(19) United States
(12) Patent Application Publication
(10) Pub. No.: US 2008/0097092 A1
(43) Pub. Date: Apr. 24, 2008

(54) siRNA targeting kinases

(75) Inventors: Anastasia Khvorova, Boulder, CO (US); Angela Reynolds, Conifer, CO (US); Devin Leake, Denver, CO (US); William Marshall, Boulder, CO (US); Steven Read, Denver, CO (US); Stephen Scaringe, Lafayette, CO (US)

Correspondence Address: KALOW & SPRINGUT LLP, 488 MADISON AVENUE, 19TH FLOOR, NEW YORK, NY, 10022, US

(73) Assignee: DHARMACON, INC., Lafayette, CO (US)

(21) Appl. No.: 11/977,128

(22) Filed: Oct. 23, 2007

Related U.S. Application Data
(63) Continuation-in-part of application No. 10/940,892, filed on Sep. 14, 2004.
Application No. 10/940,892 is a continuation of application No. PCT/US04/14885, filed on May 12, 2004.
(63) Continuation-in-part of application No. 10/714,333, filed on Nov. 14, 2003.
(60) Provisional application No. 60/426,137, filed on Nov. 14, 2002.
(60) Provisional application No. 60/502,050, filed on Sep. 10, 2003.

(51) Int. Cl. C07H 21/04

(52) U.S. Cl. 536/24.5

(57) ABSTRACT

Efficient sequence specific gene silencing is possible through the use of siRNA technology. By selecting particular siRNAs by rational design, one can maximize the generation of an effective gene silencing reagent, as well as methods for silencing genes. Methods, compositions, and kits generated through rational design of siRNAs are disclosed including those directed to nucleotide sequences for kinases.

### CROSS-REFERENCE TO RELATED APPLICATIONS

[0001] This application is a continuation-in-part of U.S. Ser. No. 10/714,333, filed Nov. 14, 2003, which claims the benefit of U.S. Provisional Application No. 60/426,137, filed Nov. 14, 2002, and also claims the benefit of U.S. Provisional Application No. 60/502,050, filed Sep. 10, 2003; this application is also a continuation-in-part of U.S. Ser. No. 10/940,892, filed Sep. 14, 2004, which is a continuation of PCT Application No. PCT/US 04/14885, international filing date May 12, 2004. The disclosures of the priority applications, including the sequence listings and tables submitted in electronic form in lieu of paper, are incorporated by reference into the instant specification.

### SEQUENCE LISTING

[0002] The sequence listing for this application has been submitted in accordance with 37 CFR § 1.52(e) and 37 CFR § 1.821 on CD-ROM in lieu of paper on a disk containing the sequence listing file entitled “DHARMA_{—}2100-US74_CRF.txt” created Oct. 1, 2007, 3.75 MB. Applicants hereby incorporate by reference the sequence listing provided on CD-ROM in lieu of paper into the instant specification.

### FIELD OF INVENTION

[0003] The present invention relates to RNA interference (“RNAi”).

### BACKGROUND OF THE INVENTION

[0004] Relatively recently, researchers observed that double stranded RNA (“dsRNA”) could be used to inhibit protein expression. This ability to silence a gene has broad potential for treating human diseases, and many researchers and commercial entities are currently investing considerable resources in developing therapies based on this technology.

[0005] Double stranded RNA induced gene silencing can occur on at least three different levels: (i) transcription inactivation, which refers to RNA guided DNA or histone methylation; (ii) siRNA induced mRNA degradation; and (iii) mRNA induced transcriptional attenuation.

[0006] It is generally considered that the major mechanism of RNA induced silencing (RNA interference, or RNAi) in mammalian cells is mRNA degradation. Initial attempts to use RNAi in mammalian cells focused on the use of long strands of dsRNA. However, these attempts to induce RNAi met with limited success, due in part to the induction of the interferon response, which results in a general, as opposed to a target-specific, inhibition of protein synthesis. Thus, long dsRNA is not a viable option for RNAi in mammalian systems.

[0007] More recently it has been shown that when short (18-30 bp) RNA duplexes are introduced into mammalian cells in culture, sequence-specific inhibition of target mRNA can be realized without inducing an interferon response. Certain of these short dsRNAs, referred to as small inhibitory RNAs (“siRNAs”), can act catalytically at sub-molar concentrations to cleave greater than 95% of the target mRNA in the cell. A description of the mechanisms for siRNA activity, as well as some of its applications are described in Provost et al. (2002) Ribonuclease Activity and RNA Binding of Recombinant Human Dicer, EMBO J. 21(21): 5864-5874; Tabara et al. (2002) The dsRNA Binding Protein RDE-4 Interacts with RDE-1, DCR-1 and a DexH-box Helicase to Direct RNAi in C. elegans, Cell 109(7):861-71; Ketting et al. (2002) Dicer Functions in RNA Interference and in Synthesis of Small RNA Involved in Developmental Timing in C. elegans; Martinez et al., Single-Stranded Antisense siRNAs Guide Target RNA Cleavage in RNAi, Cell 110(5):563; Hutvagner & Zamore (2002) A microRNA in a multiple-turnover RNAi enzyme complex, Science 297:2056.

[0008] From a mechanistic perspective, introduction of long double stranded RNA into plants and invertebrate cells is broken down into siRNA by a Type III endonuclease known as Dicer. Sharp, RNA interference—2001, Genes Dev. 2001, 15:485. Dicer, a ribonuclease-III-like enzyme, processes the dsRNA into 19-23 base pair short interfering RNAs with characteristic two base 3′ overhangs. Bernstein, Caudy, Hammond, & Hannon (2001) Role for a bidentate ribonuclease in the initiation step of RNA interference, Nature 409:363. The siRNAs are then incorporated into an RNA-induced silencing complex (RISC) where one or more helicases unwind the siRNA duplex, enabling the complementary antisense strand to guide target recognition. Nykanen, Haley, & Zamore (2001) ATP requirements and small interfering RNA structure in the RNA interference pathway, Cell 107:309. Upon binding to the appropriate target mRNA, one or more endonucleases within the RISC cleaves the target to induce silencing. Elbashir, Lendeckel, & Tuschl (2001) RNA interference is mediated by 21- and 22-nucleotide RNAs, Genes Dev. 15:188, FIG. 1.

[0009] The interference effect can be long lasting and may be detectable after many cell divisions. Moreover, RNAi exhibits sequence specificity. Kisielow, M. et al. (2002) Isoform-specific knockdown and expression of adaptor protein ShcA using small interfering RNA, J. Biochem. 363:1-5. Thus, the RNAi machinery can specifically knock down one type of transcript, while not affecting closely related mRNA. These properties make siRNA a potentially valuable tool for inhibiting gene expression and studying gene function and drug target validation. Moreover, siRNAs are potentially useful as therapeutic agents against: (1) diseases that are caused by over-expression or misexpression of genes; and (2) diseases brought about by expression of genes that contain mutations.

[0010] Successful siRNA-dependent gene silencing depends on a number of factors. One of the most contentious issues in RNAi is the question of the necessity of siRNA design, i.e., considering the sequence of the siRNA used. Early work in C. elegans and plants circumvented the issue of design by introducing long dsRNA (see, for instance, Fire, A. et al. (1998) Nature 391:806-811). In this primitive organism, long dsRNA molecules are cleaved into siRNA by Dicer, thus generating a diverse population of duplexes that can potentially cover the entire transcript. While some fraction of these molecules are non-functional (i.e., induce little or no silencing) one or more have the potential to be highly functional, thereby silencing the gene of interest and alleviating the need for siRNA design. Unfortunately, due to the interferon response, this same approach is unavailable for mammalian systems. While this effect can be circumvented by bypassing the Dicer cleavage step and directly introducing siRNA, this tactic carries with it the risk that the chosen siRNA sequence may be non-functional or semi-functional.

[0011] A number of researches have expressed the view that siRNA design is not a crucial element of RNAi. On the other hand, others in the field have begun to explore the possibility that RNAi can be made more efficient by paying attention to the design of the siRNA. Unfortunately, none of the reported methods have provided a satisfactory scheme for reliably selecting siRNA with acceptable levels of functionality. Accordingly, there is a need to develop rational criteria by which to select siRNA with an acceptable level of functionality, and to identify siRNA that have this improved level of functionality, as well as to identify siRNAs that are hyperfunctional.

### SUMMARY OF THE INVENTION

[0012] The present invention is directed to increasing the efficiency of RNAi, particularly in mammalian systems. Accordingly, the present invention provides kits, siRNAs and methods for increasing siRNA efficacy.

[0013] According to a first embodiment, the present invention provides a kit for gene silencing, wherein said kit is comprised of a pool of at least two siRNA duplexes, each of which is comprised of a sequence that is complementary to a portion of the sequence of one or more target messenger RNA, and each of which is selected using non-target specific criteria.

[0014] According to a second embodiment, the present invention provides a method for selecting an siRNA, said method comprising applying selection criteria to a set of potential siRNA that comprise 18-30 base pairs, wherein said selection criteria are non-target specific criteria, and said set comprises at least two siRNAs and each of said at least two siRNAs contains a sequence that is at least substantially complementary to a target gene; and determining the relative functionality of the at least two siRNAs.

[0015] According to a third embodiment, the present invention also provides a method for selecting an siRNA wherein said selection criteria are embodied in a formula comprising:
(−14)*G₁₃−13*A₁−12*U₇−11*U₂−10*A₁₁−10*U₄−10*C₃−10*C₅−10*C₆−9*A₁₀−9*U₉−9*C₁₈−8*G₁₀−7*U₁−7*U₁₆−7*C₁₇−7*C₁₉+7*U₁₇+8*A₂+8*A₄+8*A₅+8*C₄+9*G₈+10*A₇+10*U₁₈+11*A₁₉+11*C₉+15*G₁+18*A₃+19*U₁₀−Tm−3*(GCₜₒₜₐₗ)−6*(GC₁₅₋₁₉)−30*X; or Formula VIII
(−8)*A1+(−1)*A2+(12)*A3+(7)*A4+(18)*A5+(12)*A6+(19)*A7+(6)*A8+(−4)*A9+(−5)*A10+(−2)*A11+(−5)*A12+(17)*A13+(−3)*A14+(4)*A15+(2)*A16+(8)*A17+(11)*A18+(30)*A19+(−13)*U1+(−10)*U2+(2)*U3+(−2)*U4+(−5)*U5+(5)*U6+(−2)*U7+(−10)*U8+(−5)*U9+(15)*U10+(−1)*U11+(0)*U12+(10)*U13+(−9)*U14+(−13)*U15+(−10)*U16+(3)*U17+(9)*U18+(9)*U19+(7)*C1+(3)*C2+(−21)*C3+(5)*C4+(−9)*C5+(−20)*C6+(−18)*C7+(−5)*C8+(5)*C9+(1)*C10+(2)*C11+(−5)*C12+(−3)*C13+(−6)*C14+(−2)*C15+(−5)*C16+(−3)*C17+(−12)*C18+(−18)*C19+(14)*G1+(8)*G2+(7)*G3+(−10)*G4+(−4)*G5+(2)*G6+(1)*G7+(9)*G8+(5)*G9+(−11)*G10+(1)*G11+(9)*G12+(−24)*G13+(18)*G14+(11)*G15+(13)*G16+(−7)*G17+(−9)*G18+(−22)*G19+6*(number of A+U in position 15-19)−3*(number of G+C in whole siRNA), Formula X
wherein position numbering begins at the 5′-most position of a sense strand, and
A₁=1 if A is the base at position 1 of the sense strand, otherwise its value is 0;
A₂=1 if A is the base at position 2 of the sense strand, otherwise its value is 0;
A₃=1 if A is the base at position 3 of the sense strand, otherwise its value is 0;
A₄=1 if A is the base at position 4 of the sense strand, otherwise its value is 0;
A₅=1 if A is the base at position 5 of the sense strand, otherwise its value is 0;
A₆=1 if A is the base at position 6 of the sense strand, otherwise its value is 0;
A₇=1 if A is the base at position 7 of the sense strand, otherwise its value is 0;
A₁₀=1 if A is the base at position 10 of the sense strand, otherwise its value is 0;
A₁₁=1 if A is the base at position 11 of the sense strand, otherwise its value is 0;
A₁₃=1 if A is the base at position 13 of the sense strand, otherwise its value is 0;
A₁₉=1 if A is the base at position 19 of the sense strand, otherwise if another base is present or the sense strand is only 18 base pairs in length, its value is 0;
C₃=1 if C is the base at position 3 of the sense strand, otherwise its value is 0;
C₄=1 if C is the base at position 4 of the sense strand, otherwise its value is 0;
C₅=1 if C is the base at position 5 of the sense strand, otherwise its value is 0;
C₆=1 if C is the base at position 6 of the sense strand, otherwise its value is 0;
C₇=1 if C is the base at position 7 of the sense strand, otherwise its value is 0;
C₉=1 if C is the base at position 9 of the sense strand, otherwise its value is 0,
C₁₇=1 if C is the base at position 17 of the sense strand, otherwise its value is 0;
C₁₈=1 if C is the base at position 18 of the sense strand, otherwise its value is 0;
C₁₉=1 if C is the base at position 19 of the sense strand, otherwise if another base is present or the sense strand is only 18 base pairs in length, its value is 0;
G₁=1 if G is the base at position 1 on the sense strand, otherwise its value is 0;
G₂=1 if G is the base at position 2 of the sense strand, otherwise its value is 0;
G₈=1 if G is the base at position 8 on the sense strand, otherwise its value is 0;
G₁₀=1 if G is the base at position 10 on the sense strand, otherwise its value is 0;
G₁₃=1 if G is the base at position 13 on the sense strand, otherwise its value is 0;
G₁₉=1 if G is the base at position 19 of the sense strand, otherwise if another base is present or the sense strand is only 18 base pairs in length, its value is 0;
U₁=1 if U is the base at position 1 on the sense strand, otherwise its value is 0;
U₂=1 if U is the base at position 2 on the sense strand, otherwise its value is 0;
U₃=1 if U is the base at position 3 on the sense strand, otherwise its value is 0;
U₄=1 if U is the base at position 4 on the sense strand, otherwise its value is 0;
U₇=1 if U is the base at position 7 on the sense strand, otherwise its value is 0;
U₉=1 if U is the base at position 9 on the sense strand, otherwise its value is 0;
U₁₀=1 if U is the base at position 10 on the sense strand, otherwise its value is 0;
U₁₅=1 if U is the base at position 15 on the sense strand, otherwise its value is 0;
U₁₆=1 if U is the base at position 16 on the sense strand, otherwise its value is 0;
U₁₇=1 if U is the base at position 17 on the sense strand, otherwise its value is 0;
U₁₈=1 if U is the base at position 18 on the sense strand, otherwise its value is 0.
GC₁₅₋₁₉=the number of G and C bases within positions 15-19 of the sense strand, or within positions 15-18 if the sense strand is only 18 base pairs in length;
GCₜₒₜₐₗ=the number of G and C bases in the sense strand;
Tm=100 if the siRNA oligo has the internal repeat longer then 4 base pairs, otherwise its value is 0; and
X=the number of times that the same nucleotide repeats four or more times in a row.

[0016] According to a fourth embodiment, the invention provides a method for developing an algorithm for selecting siRNA, said method comprising: (a) selecting a set of siRNA; (b) measuring gene silencing ability of each siRNA from said set; (c) determining relative functionality of each siRNA; (d) determining improved functionality by the presence or absence of at least one variable selected from the group consisting of the presence or absence of a particular nucleotide at a particular position, the total number of As and Us in positions 15-19, the number of times that the same nucleotide repeats within a given sequence, and the total number of Gs and Cs; and (e) developing an algorithm using the information of step (d).

[0017] According to a fifth embodiment, the present invention provides a kit, wherein said kit is comprised of at least two siRNAs, wherein said at least two siRNAs comprise a first optimized siRNA and a second optimized siRNA, wherein said first optimized siRNA and said second optimized siRNA are optimized according a formula comprising Formula X.

[0018] The present invention also provides a method for identifying a hyperfunctional siRNA, comprising applying selection criteria to a set of potential siRNA that comprise 18-30 base pairs, wherein said selection criteria are non-target specific criteria, and said set comprises at least two siRNAs and each of said at least two siRNAs contains a sequence that is at least substantially complementary to a target gene; determining the relative functionality of the at least two siRNAs and assigning each of the at least two siRNAs a functionality score; and selecting siRNAs from the at least two siRNAs that have a functionality score that reflects greater than 80 percent silencing at a concentration in the picomolar range, wherein said greater than 80 percent silencing endures for greater than 120 hours.

[0019] According to a sixth embodiment, the present invention provides a hyperfunctional siRNA that is capable of silencing Bcl2.

[0020] According to a seventh embodiment, the present invention provides a method for developing an siRNA algorithm for selecting functional and hyperfunctional siRNAs for a given sequence. The method comprises:

[0021] (a) selecting a set of siRNAs;

[0022] (b) measuring the gene silencing ability of each siRNA from said set;

[0023] (c) determining the relative functionality of each siRNA;

[0024] (d) determining the amount of improved functionality by the presence or absence of at least one variable selected from the group consisting of the total GC content, melting temperature of the siRNA, GC content at positions 15-19, the presence or absence of a particular nucleotide at a particular position, relative thermodynamic stability at particular positions in a duplex, and the number of times that the same nucleotide repeats within a given sequence; and

[0025] (e) developing an algorithm using the information of step (d).

[0026] According to this embodiment, preferably the set of siRNAs comprises at least 90 siRNAs from at least one gene, more preferably at least 180 siRNAs from at least two different genes, and most preferably at least 270 and 360 siRNAs from at least three and four different genes, respectively. Additionally, in step (d) the determination is made with preferably at least two, more preferably at least three, even more preferably at least four, and most preferably all of the variables. The resulting algorithm is not target sequence specific.

[0027] In another embodiment, the present invention provides rationally designed siRNAs identified using the formulas above.

[0028] In yet another embodiment, the present invention is directed to hyperfunctional siRNA.

[0029] The ability to use the above algorithms, which are not sequence or species specific, allows for the cost-effective selection of optimized siRNAs for specific target sequences. Accordingly, there will be both greater efficiency and reliability in the use of siRNA technologies.

[0030] In various embodiments, siRNAs that target nucleotide sequences for kinases are provided. In various embodiments, the siRNAs are rationally designed. In various embodiments, the siRNAs are functional or hyperfunctional.

[0031] In various embodiments, an siRNA that targets nucleotide sequence for a kinase is provided, wherein the siRNA is selected from the group consisting of various siRNA sequences targeting nucleotide sequences for kinases that are disclosed herein. In various embodiments, the siRNA sequence is selected from the group consisting of SEQ ID NO. 438 to SEQ ID NO. 22603.

[0032] In various embodiments, siRNA comprising a sense region and an antisense region are provided, said sense region and said antisense region together form a duplex region comprising 18-30 base pairs, and said sense region comprises a sequence that is at least 90% similar to a sequence selected from the group consisting of siRNA sequences targeting nucleotide sequences for kinases that are disclosed herein. In various embodiments, the siRNA sequence is selected from the group consisting of SEQ ID NO. 438 to SEQ ID NO. 22603.

[0033] In various embodiments, an siRNA comprising a sense region and an antisense region is provided, said sense region and said antisense region together form a duplex region comprising 18-30 base pairs, and said sense region comprises a sequence that is identical to a contiguous stretch of at least 18 bases of a sequence selected from the group consisting of SEQ ID NO. 438 to SEQ ID NO. 22603. In various embodiments, the duplex region is 19-30 base pairs, and the sense region comprises a sequence that is identical to a sequence selected from the group consisting of SEQ ID NO. 438 to SEQ ID NO. 22603.

[0034] In various embodiments, a pool of at least two siRNAs is provided, wherein said pool comprises a first siRNA and a second siRNA, said first siRNA comprising a duplex region of length 18-30 base pairs that has a first sense region that is at least 90% similar to 18 bases of a first sequence selected from the group consisting of SEQ ID NO. 438 to SEQ ID NO. 22603, and said second siRNA comprises a duplex region of length 18-30 base pairs that has a second sense region that is at least 90% similar to 18 bases of a second sequence selected from the group consisting of SEQ ID NO. 438 to SEQ ID NO. 22603, wherein said first sense region and said second sense region are not identical.

[0035] In various embodiments, the first sense region comprises a sequence that is identical to at least 18 bases of a sequence selected from the group consisting of SEQ ID NO. 438 to SEQ ID NO. 22603, and said second sense region comprises a sequence that is identical to at least 18 bases of a sequence selected from the group consisting of SEQ ID NO. 438 to SEQ ID NO. 22603. In various embodiments, the duplex of said first siRNA is 19-30 base pairs, and said first sense region comprises a sequence that is at least 90% similar to a sequence selected from the group consisting of SEQ ID NO. 438 to SEQ ID NO. 22603, and said duplex of said second siRNA is 19-30 base pairs and comprises a sequence that is at least 90% similar to a sequence selected from the group consisting of SEQ ID NO. 438 to SEQ ID NO. 22603.

[0036] In various embodiments, the duplex of said first siRNA is 19-30 base pairs and said first sense region comprises a sequence that is identical to at least 18 bases of a sequence selected from the group consisting of SEQ ID NO. 438 to SEQ ID NO. 22603, and said duplex of said second siRNA is 19-30 base pairs and said second region comprises a sequence that is identical to a sequence selected from the group consisting of SEQ ID NO. 438 to SEQ ID NO. 22603.

[0037] For a better understanding of the present invention together with other and further advantages and embodiments, reference is made to the following description taken in conjunction with the examples, the scope of which is set forth in the appended claims.

### BRIEF DESCRIPTION OF THE FIGURES

[0038] FIG. 1 shows a model for siRNA-RISC interactions. RISC has the ability to interact with either end of the siRNA or miRNA molecule. Following binding, the duplex is unwound, and the relevant target is identified, cleaved, and released.

[0039] FIG. 2 is a representation of the functionality of two hundred and seventy siRNA duplexes that were generated to target human cyclophilin, human diazepam-binding inhibitor (DB), and firefly luciferase.

[0040] FIG. 3a is a representation of the silencing effect of 30 siRNAs in three different cells lines, HEK293, DU145, and Hela. FIG. 3b shows the frequency of different functional groups (>95% silencing (black), >80% silencing (gray), >50% silencing (dark gray), and <50% silencing (white)) based on GC content. In cases where a given bar is absent from a particular GC percentage, no siRNA were identified for that particular group. FIG. 3c shows the frequency of different functional groups based on melting temperature (Tm).

[0041] FIG. 4 is a representation of a statistical analysis that revealed correlations between silencing and five sequence-related properties of siRNA: (A) an A at position 19 of the sense strand, (B) an A at position 3 of the sense strand, (C) a U at position 10 of the sense strand, (D) a base other than G at position 13 of the sense strand, and (E) a base other than C at position 19 of the sense strand. All variables were correlated with siRNA silencing of firefly luciferase and human cyclophilin. siRNAs satisfying the criterion are grouped on the left (Selected) while those that do not, are grouped on the right (Eliminated). Y-axis is “% Silencing of Control.” Each position on the X-axis represents a unique siRNA.

[0042] FIGS. 5A and 5B are representations of firefly luciferase and cyclophilin siRNA panels sorted according to functionality and predicted values using Formula VIII. The siRNA found within the circle represent those that have Formula VIII values (SMARTSCORES™, or siRNA rank) above zero. siRNA outside the indicated area have calculated Formula VIII values that are below zero. Y-axis is “Expression (% Control).” Each position on the X-axis represents a unique siRNA.

[0043] FIG. 6A is a representation of the average internal stability profile (AISP) derived from 270 siRNAs taken from three separate genes (cyclophilin B, DBI and firefly luciferase). Graphs represent AISP values of highly functional, functional, and non-functional siRNA. FIG. 6B is a comparison between the AISP of naturally derived GFP siRNA (filled squares) and the AISP of siRNA from cyclophilin B, DBI, and luciferase having >90% silencing properties (no fill) for the antisense strand. “DG” is the symbol for ΔG, free energy.

[0044] FIG. 7 is a histogram showing the differences in duplex functionality upon introduction of base pair mismatches. The X-axis shows the mismatch introduced in the siRNA and the position it is introduced (e.g., 8C>A reveals that position 8 (which normally has a C) has been changed to an A). The Y-axis is “% Silencing (Normalized to Control).” The samples on the X-axis represent siRNAs at 100 nM and are, reading from left to right: 1A to C, 1A to G, 1A to U; 2A to C, 2A to G, 2A to U; 3A to C, 3A to G, 3A to U; 4G to A, 4G to C; 4G to U; 5U to A, 5U to C, 5U to G; 6U to A, 6U to C, 6U to G; 7G to A, 7G to C, 7G to U; 8C to A, 8C to G, 8C to U; 9G to A, 9G to C, 9G to U; 10C to A, 10C to G, 10C to U; 11G to A, 11G to C, 11G to U; 12G to A, 12G to C, 12G to U; 13A to C, 13A to G, 13A to U; 14G to A, 14G to C, 14G to U; 15G to A, 15G to C, 15G to U; 16A to C, 16A to G, 16A to U; 17G to A, 17G to C, 17G to U; 18U to A, 18U to C, 18U to G; 19U to A, 19U to C, 19U to G; 20 wt; Control.

[0045] FIG. 8 is histogram that shows the effects of 5′ sense and antisense strand modification with 2′-O-methylation on functionality.

[0046] FIG. 9 shows a graph of SMARTSCORES™, or siRNA rank, versus RNAi silencing values for more than 360 siRNA directed against 30 different genes. SiRNA to the right of the vertical bar represent those siRNA that have desirable SMARTSCORES™, or siRNA rank.

[0047] FIGS. 10A-E compare the RNAi of five different genes (SEAP, DBI, PLK, Firefly Luciferase, and Renilla Luciferase) by varying numbers of randomly selected siRNA and four rationally designed (SMART-selected) siRNA chosen using the algorithm described in Formula VIII. In addition, RNAi induced by a pool of the four SMART-selected siRNA is reported at two different concentrations (100 and 400 nM). 10F is a comparison between a pool of randomly selected EGFR siRNA (Pool 1) and a pool of SMART-selected EGFR siRNA (Pool 2). Pool 1, S1-S4 and Pool 2 S1-S4 represent the individual members that made up each respective pool. Note that numbers for random siRNAs represent the position of the 5′ end of the sense strand of the duplex. The Y-axis represents the % expression of the control(s). The X-axis is the percent expression of the control.

[0048] FIG. 11 shows the Western blot results from cells treated with siRNA directed against twelve different genes involved in the clathrin-dependent endocytosis pathway (CHC, DynII, CALM, CLCa, CLCb, Eps15, Eps15R, Rab5a, Rab5b, Rab5c, β2 subunit of AP-2 and EEA.1). siRNA were selected using Formula VIII. “Pool” represents a mixture of duplexes 1-4. Total concentration of each siRNA in the pool is 25 nM. Total concentration=4×25=100 nM.

[0049] FIG. 12 is a representation of the gene silencing capabilities of rationally-selected siRNA directed against ten different genes (human and mouse cyclophilin, C-myc, human lamin A/C, QB (ubiquinol-cytochrome c reductase core protein I), MEK1 and MEK2, ATE1 (arginyl-tRNA protein transferase), GAPDH, and Eg5). The Y-axis is the percent expression of the control. Numbers 1, 2, 3 and 4 represent individual rationally selected siRNA. “Pool” represents a mixture of the four individual siRNA.

[0050] FIG. 13 is the sequence of the top ten Bcl2 siRNAs as determined by Formula VIII. Sequences are listed 5′ to 3′.

[0051] FIG. 14 is the knockdown by the top ten Bcl2 siRNAs at 100 nM concentrations. The Y-axis represents the amount of expression relative to the non-specific (ns) and transfection mixture control.

[0052] FIG. 15 represents a functional walk where siRNA beginning on every other base pair of a region of the luciferase gene are tested for the ability to silence the luciferase gene. The Y-axis represents the percent expression relative to a control. The X-axis represents the position of each individual siRNA. Reading from left to right across the X-axis, the position designations are 1, 3, 5, 7, 9, 11, 13, 15, 17, 19, 21, 23, 25, 27, 29, 31, 33, 35, 37, 39, 41, 43, 45, 47, 49, 51, 53, 55, 57, 59, 61, 63, 65, 67, 69, 71, 73, 75, 77, 79, 81, 83, 85, 87, 89, and Plasmid.

[0053] FIGS. 16A and 16B are histograms demonstrating the inhibition of target gene expression by pools of 2 (16A) and 3 (16B) siRNA duplexes taken from the walk described in FIG. 15. The Y-axis in each represents the percent expression relative to control. The X-axis in each represents the position of the first siRNA in paired pools, or trios of siRNAs. For instance, the first paired pool contains siRNAs 1 and 3. The second paired pool contains siRNAs 3 and 5. Pool 3 (of paired pools) contains siRNAs 5 and 7, and so on. For each of 16A and 16B, the X-axis from left to right reads 1, 3, 5, 7, 9, 11, 13, 15, 17, 19, 21, 23, 25, 27, 29, 31, 33, 35, 37, 39, 41, 43, 45, 47, 49, 51, 53, 55, 57, 59, 61, 63, 65, 67, 69, 71, 73, 75, 77, 79, 81, 83, 85, 87, 89, and Plasmid.

[0054] FIGS. 17A and 17B are histograms demonstrating the inhibition of target gene expression by pools of 4 (17A) and 5 (17B) siRNA duplexes. The Y-axis in each represents the percent expression relative to control. The X-axis in each represents the position of the first siRNA in each pool. For each of 17A and 17B, the X-axis from left to right reads 1, 3, 5, 7, 9, 11, 13, 15, 17, 19, 21, 23, 25, 27, 29, 31, 33, 35, 37, 39, 41, 43, 45, 47, 49, 51, 53, 55, 57, 59, 61, 63, 65, 67, 69, 71, 73, 75, 77, 79, 81, 83, 85, 87, 89, and Plasmid.

[0055] FIGS. 18A and 18B are histograms demonstrating the inhibition of target gene expression by siRNAs that are ten (18A) and twenty (18B) base pairs base pairs apart. The Y-axis represents the percent expression relative to a control. The X-axis represents the position of the first siRNA in each pool. For each of 18A and 18B, the X-axis from left to right reads 1, 3, 5, 7, 9, 11, 13, 15, 17, 19, 21, 23, 25, 27, 29, 31, 33, 35, 37, 39, 41, 43, 45, 47, 49, 51, 53, 55, 57, 59, 61, 63, 65, 67, 69, 71, 73, 75, 77, 79, 81, 83, 85, 87, 89, and Plasmid.

[0056] FIG. 19 shows that pools of siRNAs (dark gray bar) work as well (or better) than the best siRNA in the pool (light gray bar). The Y-axis represents the percent expression relative to a control. The X-axis represents the position of the first siRNA in each pool. The X-axis from left to right reads 1, 3, 5, 7, 9, 11, 13, 15, 17, 19, 21, 23, 25, 27, 29, 31, 33, 35, 37, 39, 41, 43, 45, 47, 49, 51, 53, 55, 57, 59, 61, 63, 65, 67, 69, 71, 73, 75, 77, 79, 81, 83, 85, 87, 89, and Plasmid.

[0057] FIG. 20 shows that the combination of several semifunctional siRNAs (dark gray) result in a significant improvement of gene expression inhibition over individual (semi-functional; light gray) siRNA. The Y-axis represents the percent expression relative to a control.

[0058] FIGS. 21A, 21B and 21C show both pools (Library, Lib) and individual siRNAs in inhibition of gene expression of Beta-Galactosidase, Renilla Luciferase and SEAP (alkaline phosphatase). Numbers on the X-axis indicate the position of the 5′-most nucleotide of the sense strand of the duplex. The Y-axis represents the percent expression of each gene relative to a control. Libraries contain 19 nucleotide long siRNAs (not including overhangs) that begin at the following nucleotides: SEAP: Lib 1: 206, 766, 812, 923, Lib 2: 1117, 1280, 1300, 1487, Lib 3: 206, 766, 812, 923, 1117, 1280, 1300, 1487, Lib 4: 206, 812, 1117, 1300, Lib 5: 766, 923, 1280, 1487, Lib 6: 206, 1487; Bgal: Lib 1: 979, 1339, 2029, 2590, Lib 2: 1087, 1783, 2399, 3257, Lib 3: 979, 1783, 2590, 3257, Lib 4: 979, 1087, 1339, 1783, 2029, 2399, 2590, 3257, Lib 5: 979, 1087, 1339, 1783, Lib 6: 2029, 2399, 2590, 3257; Renilla: Lib 1: 174, 300, 432, 568, Lib 2: 592, 633, 729, 867, Lib 3: 174, 300, 432, 568, 592, 633, 729, 867, Lib 4: 174, 432, 592, 729, Lib 5: 300, 568, 633, 867, Lib 6: 592, 568.

[0059] FIG. 22 shows the results of an EGFR and TfnR internalization assay when single gene knockdowns are performed. The Y-axis represents percent internalization relative to control.

[0060] FIG. 23 shows the results of an EGFR and TfnR internalization assay when multiple genes are knocked down (e.g., Rab5a, b, c). The Y-axis represents the percent internalization relative to control.

[0061] FIG. 24 shows the simultaneous knockdown of four different genes. siRNAs directed against G6PD, GAPDH, PLK, and UQC were simultaneously introduced into cells. Twenty-four hours later, cultures were harvested and assayed for mRNA target levels for each of the four genes. A comparison is made between cells transfected with individual siRNAs vs. a pool of siRNAs directed against all four genes.

[0062] FIG. 25 shows the functionality of ten siRNAs at 0.3 nM concentrations.

### DETAILED DESCRIPTION

### Definitions

[0063] Unless stated otherwise, the following terms and phrases have the meanings provided below:

Complementary

[0064] The term “complementary” refers to the ability of polynucleotides to form base pairs with one another. Base pairs are typically formed by hydrogen bonds between nucleotide units in antiparallel polynucleotide strands. Complementary polynucleotide strands can base pair in the Watson-Crick manner (e.g., A to T, A to U, C to G), or in any other manner that allows for the formation of duplexes. As persons skilled in the art are aware, when using RNA as opposed to DNA, uracil rather than thymine is the base that is considered to be complementary to adenosine. However, when a U is denoted in the context of the present invention, the ability to substitute a T is implied, unless otherwise stated.

[0065] Perfect complementarity or 100% complementarity refers to the situation in which each nucleotide unit of one polynucleotide strand can hydrogen bond with a nucleotide unit of a second polynucleotide strand. Less than perfect complementarity refers to the situation in which some, but not all, nucleotide units of two strands can hydrogen bond with each other. For example, for two 20-mers, if only two base pairs on each strand can hydrogen bond with each other, the polynucleotide strands exhibit 10% complementarity. In the same example, if 18 base pairs on each strand can hydrogen bond with each other, the polynucleotide strands exhibit 90% complementarity.

Deoxynucleotide

[0066] The term “deoxynucleotide” refers to a nucleotide or polynucleotide lacking a hydroxyl group (OH group) at the 2′ and/or 3′ position of a sugar moiety. Instead, it has a hydrogen bonded to the 2′ and/or 3′ carbon. Within an RNA molecule that comprises one or more deoxynucleotides, “deoxynucleotide” refers to the lack of an OH group at the 2′ position of the sugar moiety, having instead a hydrogen bonded directly to the 2′ carbon.

Deoxyribonucleotide

[0067] The terms “deoxyribonucleotide” and “DNA” refer to a nucleotide or polynucleotide comprising at least one sugar moiety that has an H, rather than an OH, at its 2′ and/or 3′ position.

Duplex Region

[0068] The phrase “duplex region” refers to the region in two complementary or substantially complementary polynucleotides that form base pairs with one another, either by Watson-Crick base pairing or any other manner that allows for a stabilized duplex between polynucleotide strands that are complementary or substantially complementary. For example, a polynucleotide strand having 21 nucleotide units can base pair with another polynucleotide of 21 nucleotide units, yet only 19 bases on each strand are complementary or substantially complementary, such that the “duplex region” has 19 base pairs. The remaining bases may, for example, exist as 5′ and 3′ overhangs. Further, within the duplex region, 100% complementarity is not required; substantial complementarity is allowable within a duplex region. Substantial complementarity refers to 79% or greater complementarity. For example, a mismatch in a duplex region consisting of 19 base pairs results in 94.7% complementarity, rendering the duplex region substantially complementary.

Filters

[0069] The term “filter” refers to one or more procedures that are performed on sequences that are identified by the algorithm. In some instances, filtering includes in silico procedures where sequences identified by the algorithm can be screened to identify duplexes carrying desirable or undesirable motifs. Sequences carrying such motifs can be selected for, or selected against, to obtain a final set with the preferred properties. In other instances, filtering includes wet lab experiments. For instance, sequences identified by one or more versions of the algorithm can be screened using any one of a number of procedures to identify duplexes that have hyperfunctional traits (e.g., they exhibit a high degree of silencing at subnanomolar concentrations and/or exhibit high degrees of silencing longevity).

Gene Silencing

[0070] The phrase “gene silencing” refers to a process by which the expression of a specific gene product is lessened or attenuated. Gene silencing can take place by a variety of pathways. Unless specified otherwise, as used herein, gene silencing refers to decreases in gene product expression that results from RNA interference (RNAi), a defined, though partially characterized pathway whereby small inhibitory RNA (siRNA) act in concert with host proteins (e.g., the RNA induced silencing complex, RISC) to degrade messenger RNA (mRNA) in a sequence-dependent fashion. The level of gene silencing can be measured by a variety of means, including, but not limited to, measurement of transcript levels by Northern Blot Analysis, B-DNA techniques, transcription-sensitive reporter constructs, expression profiling (e.g., DNA chips), and related technologies. Alternatively, the level of silencing can be measured by assessing the level of the protein encoded by a specific gene. This can be accomplished by performing a number of studies including Western Analysis, measuring the levels of expression of a reporter protein that has e.g., fluorescent properties (e.g., GFP) or enzymatic activity (e.g., alkaline phosphatases), or several other procedures.

miRNA

[0071] The term “miRNA” refers to microRNA.

Nucleotide

[0072] The term “nucleotide” refers to a ribonucleotide or a deoxyribonucleotide or modified form thereof, as well as an analog thereof. Nucleotides include species that comprise purines, e.g., adenine, hypoxanthine, guanine, and their derivatives and analogs, as well as pyrimidines, e.g., cytosine, uracil, thymine, and their derivatives and analogs.

[0073] Nucleotide analogs include nucleotides having modifications in the chemical structure of the base, sugar and/or phosphate, including, but not limited to, 5-position pyrimidine modifications, 8-position purine modifications, modifications at cytosine exocyclic amines, and substitution of 5-bromo-uracil; and 2′-position sugar modifications, including but not limited to, sugar-modified ribonucleotides in which the 2′-OH is replaced by a group such as an H, OR, R, halo, SH, SR, NH₂, NHR, NR₂, or CN, wherein R is an alkyl moiety. Nucleotide analogs are also meant to include nucleotides with bases such as inosine, queuosine, xanthine, sugars such as 2′-methyl ribose, non-natural phosphodiester linkages such as methylphosphonates, phosphorothioates and peptides.

[0074] Modified bases refer to nucleotide bases such as, for example, adenine, guanine, cytosine, thymine, uracil, xanthine, inosine, and queuosine that have been modified by the replacement or addition of one or more atoms or groups. Some examples of types of modifications that can comprise nucleotides that are modified with respect to the base moieties include but are not limited to, alkylated, halogenated, thiolated, aminated, amidated, or acetylated bases, individually or in combination. More specific examples include, for example, 5-propynyluridine, 5-propynylcytidine, 6-methyladenine, 6-methylguanine, N,N,-dimethyladenine, 2-propyladenine, 2-propylguanine, 2-aminoadenine, 1-methylinosine, 3-methyluridine, 5-methylcytidine, 5-methyluridine and other nucleotides having a modification at the 5 position, 5-(2-amino)propyl uridine, 5-halocytidine, 5-halouridine, 4-acetylcytidine, 1-methyladenosine, 2-methyladenosine, 3-methylcytidine, 6-methyluridine, 2-methylguanosine, 7-methylguanosine, 2,2-dimethylguanosine, 5-methylaminoethyluridine, 5-methyloxyuridine, deazanucleotides such as 7-deaza-adenosine, 6-azouridine, 6-azocytidine, 6-azothymidine, 5-methyl-2-thiouridine, other thio bases such as 2-thiouridine and 4-thiouridine and 2-thiocytidine, dihydrouridine, pseudouridine, queuosine, archaeosine, naphthyl and substituted naphthyl groups, any O- and N-alkylated purines and pyrimidines such as N6-methyladenosine, 5-methylcarbonylmethyluridine, uridine 5-oxyacetic acid, pyridine-4-one, pyridine-2-one, phenyl and modified phenyl groups such as aminophenol or 2,4,6-trimethoxy benzene, modified cytosines that act as G-clamp nucleotides, 8-substituted adenines and guanines, 5-substituted uracils and thymines, azapyrimidines, carboxyhydroxyalkyl nucleotides, carboxyalkylaminoalkyl nucleotides, and alkylcarbonylalkylated nucleotides. Modified nucleotides also include those nucleotides that are modified with respect to the sugar moiety, as well as nucleotides having sugars or analogs thereof that are not ribosyl. For example, the sugar moieties may be, or be based on, mannoses, arabinoses, glucopyranoses, galactopyranoses, 4′-thioribose, and other sugars, heterocycles, or carbocycles.

[0075] The term nucleotide is also meant to include what are known in the art as universal bases. By way of example, universal bases include but are not limited to 3-nitropyrrole, 5-nitroindole, or nebularine. The term “nucleotide” is also meant to include the N3′ to P5′ phosphoramidate, resulting from the substitution of a ribosyl 3′ oxygen with an amine group.

[0076] Further, the term nucleotide also includes those species that have a detectable label, such as for example a radioactive or fluorescent moiety, or mass label attached to the nucleotide.

Off-Target Silencing and Off-Target Interference

[0077] The phrases “off-target silencing” and “off-target interference” are defined as degradation of mRNA other than the intended target mRNA due to overlapping and/or partial homology with secondary mRNA messages.

Polynucleotide

[0078] The term “polynucleotide” refers to polymers of nucleotides, and includes but is not limited to DNA, RNA, DNA/RNA hybrids including polynucleotide chains of regularly and/or irregularly alternating deoxyribosyl moieties and ribosyl moieties (i.e., wherein alternate nucleotide units have an —OH, then and —H, then an —OH, then an —H, and so on at the 2′ position of a sugar moiety), and modifications of these kinds of polynucleotides, wherein the attachment of various entities or moieties to the nucleotide units at any position are included.

Polyribonucleotide

[0079] The term “polyribonucleotide” refers to a polynucleotide comprising two or more modified or unmodified ribonucleotides and/or their analogs. The term “polyribonucleotide” is used interchangeably with the term “oligoribonucleotide.”

Ribonucleotide and Ribonucleic Acid

[0080] The term “ribonucleotide” and the phrase “ribonucleic acid” (RNA), refer to a modified or unmodified nucleotide or polynucleotide comprising at least one ribonucleotide unit. A ribonucleotide unit comprises an hydroxyl group attached to the 2′ position of a ribosyl moiety that has a nitrogenous base attached in N-glycosidic linkage at the 1′ position of a ribosyl moiety, and a moiety that either allows for linkage to another nucleotide or precludes linkage.

siRNA

[0081] The term “siRNA” refers to small inhibitory RNA duplexes that induce the RNA interference (RNAi) pathway. These molecules can vary in length (generally 18-30 base pairs) and contain varying degrees of complementarity to their target mRNA in the antisense strand. Some, but not all, siRNA have unpaired overhanging bases on the 5′ or 3′ end of the sense strand and/or the antisense strand. The term “siRNA” includes duplexes of two separate strands, as well as single strands that can form hairpin structures comprising a duplex region.

[0082] siRNA may be divided into five (5) groups (non-functional, semi-functional, functional, highly functional, and hyper-functional) based on the level or degree of silencing that they induce in cultured cell lines. As used herein, these definitions are based on a set of conditions where the siRNA is transfected into said cell line at a concentration of 100 nM and the level of silencing is tested at a time of roughly 24 hours after transfection, and not exceeding 72 hours after transfection. In this context, “non-functional siRNA” are defined as those siRNA that induce less than 50% (<50%) target silencing. “Semi-functional siRNA” induce 50-79% target silencing. “Functional siRNA” are molecules that induce 80-95% gene silencing. “Highly-functional siRNA” are molecules that induce greater than 95% gene silencing. “Hyperfunctional siRNA” are a special class of molecules. For purposes of this document, hyperfunctional siRNA are defined as those molecules that: (1) induce greater than 95% silencing of a specific target when they are transfected at subnanomolar concentrations (i.e., less than one nanomolar); and/or (2) induce functional (or better) levels of silencing for greater than 96 hours. These relative functionalities (though not intended to be absolutes) may be used to compare siRNAs to a particular target for applications such as functional genomics, target identification and therapeutics.

SMARTSCORE™, or siRNA Rank

[0083] The term “SMARTSCORE™”, or “siRNA rank” refers to a number determined by applying any of the formulas to a given siRNA sequence. The term “SMART-selected” or “rationally selected” or “rational selection” refers to siRNA that have been selected on the basis of their SMARTSCORES™, or siRNA ranking.

Substantially Similar

[0084] The phrase “substantially similar” refers to a similarity of at least 90% with respect to the identity of the bases of the sequence.

Target

[0085] The term “target” is used in a variety of different forms throughout this document and is defined by the context in which it is used. “Target mRNA” refers to a messenger RNA to which a given siRNA can be directed against. “Target sequence” and “target site” refer to a sequence within the mRNA to which the sense strand of an siRNA shows varying degrees of homology and the antisense strand exhibits varying degrees of complementarity. The phrase “siRNA target” can refer to the gene, mRNA, or protein against which an siRNA is directed. Similarly, “target silencing” can refer to the state of a gene, or the corresponding mRNA or protein.

Transfection

[0086] The term “transfection” refers to a process by which agents are introduced into a cell. The list of agents that can be transfected is large and includes, but is not limited to, siRNA, sense and/or anti-sense sequences, DNA encoding one or more genes and organized into an expression plasmid, proteins, protein fragments, and more. There are multiple methods for transfecting agents into a cell including, but not limited to, electroporation, calcium phosphate-based transfections, DEAE-dextran-based transfections, lipid-based transfections, molecular conjugate-based transfections (e.g., polylysine-DNA conjugates), microinjection and others.

[0087] The present invention is directed to improving the efficiency of gene silencing by siRNA. Through the inclusion of multiple siRNA sequences that are targeted to a particular gene and/or selecting an siRNA sequence based on certain defined criteria, improved efficiency may be achieved.

[0088] The present invention will now be described in connection with preferred embodiments. These embodiments are presented in order to aid in an understanding of the present invention and are not intended, and should not be construed, to limit the invention in any way. All alternatives, modifications and equivalents that may become apparent to those of ordinary skill upon reading this disclosure are included within the spirit and scope of the present invention.

[0089] Furthermore, this disclosure is not a primer on RNA interference. Basic concepts known to persons skilled in the art have not been set forth in detail.

[0090] The present invention is directed to increasing the efficiency of RNAi, particularly in mammalian systems. Accordingly, the present invention provides kits, siRNAs and methods for increasing siRNA efficacy.

[0091] According to a first embodiment, the present invention provides a kit for gene silencing, wherein said kit is comprised of a pool of at least two siRNA duplexes, each of which is comprised of a sequence that is complementary to a portion of the sequence of one or more target messenger RNA, and each of which is selected using non-target specific criteria. Each of the at least two siRNA duplexes of the kit complementary to a portion of the sequence of one or more target mRNAs is preferably selected using Formula X.

[0092] According to a second embodiment, the present invention provides a method for selecting an siRNA, said method comprising applying selection criteria to a set of potential siRNA that comprise 18-30 base pairs, wherein said selection criteria are non-target specific criteria, and said set comprises at least two siRNAs and each of said at least two siRNAs contains a sequence that is at least substantially complementary to a target gene; and determining the relative functionality of the at least two siRNAs.

[0093] In one embodiment, the present invention also provides a method wherein said selection criteria are embodied in a formula comprising:
(−14)*G₁₃−13*A₁−12*U₇−11*U₂−10*A₁₁−10*U₄−10*C₃−10*C₅−10*C₆−9*A₁₀−9*U₉−9*C₁₈−8*G₁₀−7*U₁−7*U₁₆−7*C₁₇−7*C₁₉+7*U₁₇+8*A₂+8*A₄+8*A₅+8*C₄+9*G₈+10*A₇+10*U₁₈+11*A₁₉+11*C₉+15*G₁+18*A₃+19*U₁₀−Tm−3*(GCₜₒₜₐₗ)−6*(GC₁₅₋₁₉)−30*X; or Formula VIII
(−8)*A1+(−1)*A2+(12)*A3+(7)*A4+(18)*A5+(12)*A6+(19)*A7+(6)*A8+(−4)*A9+(−5)*A10+(−2)*A11+(−5)*A12+(17)*A13+(−3)*A14+(4)*A15+(2)*A16+(8)*A17+(11)*A18+(30)*A19+(−13)*U1+(−10)*U2+(2)*U3+(−2)*U4+(−5)*U5+(5)*U6+(−2)*U7+(−10)*U8+(−5)*U9+(15)*U10+(−1)*U11+(0)*U12+(10)*U13+(−9)*U14+(−13)*U15+(−10)*U16+(3)*U17+(9)*U18+(9)*U19+(7)*C1+(3)*C2+(−21)*C3+(5)*C4+(−9)*C5+(−20)*C6+(−18)*C7+(−5)*C8+(5)*C9+(1)*C10+(2)*C11+(−5)*C12+(−3)*C13+(−6)*C14+(−2)*C15+(−5)*C16+(−3)*C17+(−12)*C18+(−18)*C19+(14)*G1+(8)*G2+(7)*G3+(−10)*G4+(−4)*G5+(2)*G6+(1)*G7+(9)*G8+(5)*G9+(−11)*G10+(1)*G11+(9)*G12+(−24)*G13+(18)*G14+(11)*G15+(13)*G16+(−7)*G17+(−9)*G18+(−22)*G19+6*(number of A+U in position 15-19)−3*(number of G+C in whole siRNA), Formula X

[0094] wherein position numbering begins at the 5′-most position of a sense strand, and

[0095] A₁=1 if A is the base at position 1 of the sense strand, otherwise its value is 0;

[0096] A₂=1 if A is the base at position 2 of the sense strand, otherwise its value is 0;

[0097] A₃=1 if A is the base at position 3 of the sense strand, otherwise its value is 0;

[0098] A₄=1 if A is the base at position 4 of the sense strand, otherwise its value is 0;

[0099] A₅=1 if A is the base at position 5 of the sense strand, otherwise its value is 0;

[0100] A₆=1 if A is the base at position 6 of the sense strand, otherwise its value is 0;

[0101] A₇=1 if A is the base at position 7 of the sense strand, otherwise its value is 0;

[0102] A₁₀=1 if A is the base at position 10 of the sense strand, otherwise its value is 0;

[0103] A₁₁=1 if A is the base at position 11 of the sense strand, otherwise its value is 0;

[0104] A₁₃=1 if A is the base at position 13 of the sense strand, otherwise its value is 0;

[0105] A₁₉=1 if A is the base at position 19 of the sense strand, otherwise if another base is present or the sense strand is only 18 base pairs in length, its value is 0;

[0106] C₃=1 if C is the base at position 3 of the sense strand, otherwise its value is 0;

[0107] C₄=1 if C is the base at position 4 of the sense strand, otherwise its value is 0;

[0108] C₅=1 if C is the base at position 5 of the sense strand, otherwise its value is 0;

[0109] C₆=1 if C is the base at position 6 of the sense strand, otherwise its value is 0;

[0110] C₇=1 if C is the base at position 7 of the sense strand, otherwise its value is 0;

[0111] C₉=1 if C is the base at position 9 of the sense strand, otherwise its value is 0;

[0112] C₁₇=1 if C is the base at position 17 of the sense strand, otherwise its value is 0;

[0113] C₁₈=1 if C is the base at position 18 of the sense strand, otherwise its value is 0;

[0114] C₁₉=1 if C is the base at position 19 of the sense strand, otherwise if another base is present or the sense strand is only 18 base pairs in length, its value is 0;

[0115] G₁=1 if G is the base at position 1 on the sense strand, otherwise its value is 0;

[0116] G₂=1 if G is the base at position 2 of the sense strand, otherwise its value is 0;

[0117] G₈=1 if G is the base at position 8 on the sense strand, otherwise its value is 0;

[0118] G₁₀=1 if G is the base at position 10 on the sense strand, otherwise its value is 0;

[0119] G₁₃=1 if G is the base at position 13 on the sense strand, otherwise its value is 0;

[0120] G₁₉=1 if G is the base at position 19 of the sense strand, otherwise if another base is present or the sense strand is only 18 base pairs in length, its value is 0;

[0121] U₁=1 if U is the base at position 1 oil the sense strand, otherwise its value is 0;

[0122] U₂=1 if U is the base at position 2 on the sense strand, otherwise its value is 0;

[0123] U₃=1 if U is the base at position 3 on the sense strand, otherwise its value is 0;

[0124] U₄=1 if U is the base at position 4 on the sense strand, otherwise its value is 0;

[0125] U₇=1 if U is the base at position 7 on the sense strand, otherwise its value is 0;

[0126] U₉=1 if U is the base at position 9 on the sense strand, otherwise its value is 0;

[0127] U₁₀=1 if U is the base at position 10 on the sense strand, otherwise its value is 0;

[0128] U₁₅=1 if U is the base at position 15 on the sense strand, otherwise its value is 0;

[0129] U₁₆=1 if U is the base at position 16 on the sense strand, otherwise its value is 0;

[0130] U₁₇=1 if U is the base at position 17 on the sense strand, otherwise its value is 0;

[0131] U₁₈=1 if U is the base at position 18 on the sense strand, otherwise its value is 0.

[0132] GC₁₅₋₁₉=the number of G and C bases within positions 15-19 of the sense strand, or within positions 15-18 if the sense strand is only 18 base pairs in length;

[0133] GCₜₒₜₐₗ=the number of G and C bases in the sense strand;

Tm=100 if the siRNA oligo has the internal repeat longer then 4 base pairs, otherwise its value is 0; and

[0134] X=the number of times that the same nucleotide repeats four or more times in a row.

[0135] Any of the methods of selecting siRNA in accordance with the invention can further comprise comparing the internal stability profiles of the siRNAs to be selected, and selecting those siRNAs with the most favorable internal stability profiles. Any of the methods of selecting siRNA can further comprise selecting either for or against sequences that contain motifs that induce cellular stress. Such motifs include, for example, toxicity motifs. Any of the methods of selecting siRNA can further comprise either selecting for or selecting against sequences that comprise stability motifs.

[0136] In another embodiment, the present invention provides a method of gene silencing, comprising introducing into a cell at least one siRNA selected according to any of the methods of the present invention. The siRNA can be introduced by allowing passive uptake of siRNA, or through the use of a vector.

[0137] According to a third embodiment, the invention provides a method for developing an algorithm for selecting siRNA, said method comprising: (a) selecting a set of siRNA; (b) measuring gene silencing ability of each siRNA from said set; (c) determining relative functionality of each siRNA; (d) determining improved functionality by the presence or absence of at least one variable selected from the group consisting of the presence or absence of a particular nucleotide at a particular position, the total number of As and Us in positions 15-19, the number of times that the same nucleotide repeats within a given sequence, and the total number of Cs and Cs; and (e) developing an algorithm using the information of step (d).

[0138] In another embodiment, the invention provides a method for selecting an siRNA with improved functionality, comprising using the above-mentioned algorithm to identify an siRNA of improved functionality.

[0139] According to a fourth embodiment, the present invention provides a kit, wherein said kit is comprised of at least two siRNAs, wherein said at least two siRNAs comprise a first optimized siRNA and a second optimized siRNA, wherein said first optimized siRNA and said second optimized siRNA are optimized according a formula comprising Formula X.

[0140] According to a fifth embodiment, the present invention provides a method for identifying a hyperfunctional siRNA, comprising applying selection criteria to a set of potential siRNA that comprise 18-30 base pairs, wherein said selection criteria are non-target specific criteria, and said set comprises at least two siRNAs and each of said at least two siRNAs contains a sequence that is at least substantially complementary to a target gene; determining the relative functionality of the at least two siRNAs and assigning each of the at least two siRNAs a functionality score; and selecting siRNAs from the at least two siRNAs that have a functionality score that reflects greater than 80 percent silencing at a concentration in the picomolar range, wherein said greater than 80 percent silencing endures for greater than 120 hours.

[0141] In other embodiments, the invention provides kits and/or methods wherein the siRNA are comprised of two separate polynucleotide strands; wherein the siRNA are comprised of a single contiguous molecule such as, for example, a unimolecular siRNA (comprising, for example, either a nucleotide or non-nucleotide loop); wherein the siRNA are expressed from one or more vectors; and wherein two or more genes are silenced by a single administration of siRNA.

[0142] According to a sixth embodiment, the present invention provides a hyperfunctional siRNA that is capable of silencing Bcl2.

[0143] According to a seventh embodiment, the present invention provides a method for developing an siRNA algorithm for selecting functional and hyperfunctional siRNAs for a given sequence. The method comprises:

[0144] (a) selecting a set of siRNAs;

[0145] (b) measuring the gene silencing ability of each siRNA from said set;

[0146] (c) determining the relative functionality of each siRNA;

[0147] (d) determining the amount of improved functionality by the presence or absence of at least one variable selected from the group consisting of the total GC content, melting temperature of the siRNA, GC content at positions 15-19, the presence or absence of a particular nucleotide at a particular position, relative thermodynamic stability at particular positions in a duplex, and the number of times that the same nucleotide repeats within a given sequence; and

[0148] (e) developing an algorithm using the information of step (d).

[0149] According to this embodiment, preferably the set of siRNAs comprises at least 90 siRNAs from at least one gene, more preferably at least 180 siRNAs from at least two different genes, and most preferably at least 270 and 360 siRNAs from at least three and four different genes, respectively. Additionally, in step (d) the determination is made with preferably at least two, more preferably at least three, even more preferably at least four, and most preferably all of the variables. The resulting algorithm is not target sequence specific.

[0150] In another embodiment, the present invention provides rationally designed siRNAs identified using the formulas above.

[0151] In yet another embodiment, the present invention is directed to hyperfunctional siRNA.

[0152] The ability to use the above algorithms, which are not sequence or species specific, allows for the cost-effective selection of optimized siRNAs for specific target sequences. Accordingly, there will be both greater efficiency and reliability in the use of siRNA technologies.

[0153] The methods disclosed herein can be used in conjunction with comparing internal stability profiles of selected siRNAs, and designing an siRNA with a desirable internal stability profile; and/or in conjunction with a selection either for or against sequences that contain motifs that induce cellular stress, for example, cellular toxicity.

[0154] Any of the methods disclosed herein can be used to silence one or more genes by introducing an siRNA selected, or designed, in accordance with any of the methods disclosed herein. The siRNA(s) can be introduced into the cell by any method known in the art, including passive uptake or through the use of one or more vectors.

[0155] Any of the methods and kits disclosed herein can employ either unimolecular siRNAs, siRNAs comprised of two separate polynucleotide strands, or combinations thereof. Any of the methods disclosed herein can be used in gene silencing, where two or more genes are silenced by a single administration of siRNA(s). The siRNA(s) can be directed against two or more target genes, and administered in a single dose or single transfection, as the case may be.

Optimizing siRNA

[0156] According to one embodiment, the present invention provides a method for improving the effectiveness of gene silencing for use to silence a particular gene through the selection of an optimal siRNA. An siRNA selected according to this method may be used individually, or in conjunction with the first embodiment, i.e., with one or more other siRNAs, each of which may or may not be selected by this criteria in order to maximize their efficiency.

[0157] The degree to which it is possible to select an siRNA for a given mRNA that maximizes these criteria will depend on the sequence of the mRNA itself. However, the selection criteria will be independent of the target sequence. According to this method, an siRNA is selected for a given gene by using a rational design. That said, rational design can be described in a variety of ways. Rational design is, in simplest terms, the application of a proven set of criteria that enhance the probability of identifying a functional or hyperfunctional siRNA. In one method, rationally designed siRNA can be identified by maximizing one or more of the following criteria:

[0158] (1) A low GC content, preferably between about 30-52%.

[0159] (2) At least 2, preferably at least 3 A or U bases at positions 15-19 of the siRNA on the sense strand.

[0160] (3) An A base at position 19 of the sense strand.

[0161] (4) An A base at position 3 of the sense strand.

[0162] (5) A U base at position 10 of the sense strand.

[0163] (6) An A base at position 14 of the sense strand.

[0164] (7) A base other than C at position 19 of the sense strand.

[0165] (8) A base other than G at position 13 of the sense strand.

[0166] (9) A Tm, which refers to the character of the internal repeat that results in inter- or intramolecular structures for one strand of the duplex, that is preferably not stable at greater than 50° C., more preferably not stable at greater than 37° C., even more preferably not stable at greater than 30° C. and most preferably not stable at greater than 20° C.

[0167] (10) A base other than U at position 5 of the sense strand.

[0168] (11) A base other than A at position 11 of the sense strand.

[0169] (12) A base other than an A at position 1 of the sense strand.

[0170] (13) A base other than an A at position 2 of the sense strand.

[0171] (14) An A base at position 4 of the sense strand.

[0172] (15) An A base at position 5 of the sense strand.

[0173] (16) An A base at position 6 of the sense strand.

[0174] (17) An A base at position 7 of the sense strand.

[0175] (18) An A base at position 8 of the sense strand.

[0176] (19) A base other than an A at position 9 of the sense strand.

[0177] (20) A base other than an A at position 10 of the sense strand.

[0178] (21) A base other than an A at position 11 of the sense strand.

[0179] (22) A base other than an A at position 12 of the sense strand.

[0180] (23) An A base at position 13 of the sense strand.

[0181] (24) A base other than an A at position 14 of the sense strand.

[0182] (25) An A base at position 15 of the sense strand

[0183] (26) An A base at position 16 of the sense strand.

[0184] (27) An A base at position 17 of the sense strand.

[0185] (28) An A base at position 18 of the sense strand.

[0186] (29) A base other than a U at position 1 of the sense strand.

[0187] (30) A base other than a U at position 2 of the sense strand.

[0188] (31) A U base at position 3 of the sense strand.

[0189] (32) A base other than a U at position 4 of the sense strand.

[0190] (33) A base other than a U at position 5 of the sense strand.

[0191] (34) A U base at position 6 of the sense strand.

[0192] (35) A base other than a U at position 7 of the sense strand.

[0193] (36) A base other than a U at position 8 of the sense strand.

[0194] (37) A base other than a U at position 9 of the sense strand.

[0195] (38) A base other than a U at position 1 of the sense strand.

[0196] (39) A U base at position 13 of the sense strand.

[0197] (40) A base other than a U at position 14 of the sense strand.

[0198] (41) A base other than a U at position 15 of the sense strand.

[0199] (42) A base other than a U at position 16 of the sense strand.

[0200] (43) A U base at position 17 of the sense strand.

[0201] (44) A U base at position 18 of the sense strand.

[0202] (45) A U base at position 19 of the sense strand.

[0203] (46) A C base at position 1 of the sense strand.

[0204] (47) A C base at position 2 of the sense strand.

[0205] (48) A base other than a C at position 3 of the sense strand.

[0206] (49) A C base at position 4 of the sense strand.

[0207] (50) A base other than a C at position 5 of the sense strand.

[0208] (51) A base other than a C at position 6 of the sense strand.

[0209] (52) A base other than a C at position 7 of the sense strand.

[0210] (53) A base other than a C at position 8 of the sense strand.

[0211] (54) A C base at position 9 of the sense strand.

[0212] (55) A C base at position 10 of the sense strand.

[0213] (56) A C base at position 11 of the sense strand.

[0214] (57) A base other than a C at position 12 of the sense strand.

[0215] (58) A base other than a C at position 13 of the sense strand.

[0216] (59) A base other than a C at position 14 of the sense strand.

[0217] (60) A base other than a C at position 15 of the sense strand.

[0218] (61) A base other than a C at position 16 of the sense strand.

[0219] (62) A base other than a C at position 17 of the sense strand.

[0220] (63) A base other than a C at position 18 of the sense strand.

[0221] (64) A G base at position 1 of the sense strand.

[0222] (65) A G base at position 2 of the sense strand.

[0223] (66) A G base at position 3 of the sense strand.

[0224] (67) A base other than a G at position 4 of the sense strand.

[0225] (68) A base other than a G at position 5 of the sense strand.

[0226] (69) A G base at position 6 of the sense strand.

[0227] (70) A G base at position 7 of the sense strand.

[0228] (71) A G base at position 8 of the sense strand.

[0229] (72) A G base at position 9 of the sense strand.

[0230] (73) A base other than a G at position 10 of the sense strand.

[0231] (74) A G base at position 11 of the sense strand.

[0232] (75) A G base at position 12 of the sense strand.

[0233] (76) A G base at position 14 of the sense strand.

[0234] (77) A G base at position 15 of the sense strand.

[0235] (78) A G base at position 16 of the sense strand.

[0236] (79) A base other than a G at position 17 of the sense strand.

[0237] (80) A base other than a G at position 18 of the sense strand.

[0238] (81) A base other than a G at position 19 of the sense strand.

[0239] The importance of various criteria can vary greatly. For instance, a C base at position 10 of the sense strand makes a minor contribution to duplex functionality. In contrast, the absence of a C at position 3 of the sense strand is very important. Accordingly, preferably an siRNA will satisfy as many of the aforementioned criteria as possible.

[0240] With respect to the criteria, GC content, as well as a high number of AU in positions 15-19 of the sense strand, may be important for easement of the unwinding of double stranded siRNA duplex. Duplex unwinding has been shown to be crucial for siRNA functionality in vivo.

[0241] With respect to criterion 9, the internal structure is measured in terms of the melting temperature of the single strand of siRNA, which is the temperature at which 50% of the molecules will become denatured. With respect to criteria 2-8 and 10-11, the positions refer to sequence positions on the sense strand, which is the strand that is identical to the mRNA.

[0242] In one preferred embodiment, at least criteria 1 and 8 are satisfied. In another preferred embodiment, at least criteria 7 and 8 are satisfied. In still another preferred embodiment, at least criteria 1, 8 and 9 are satisfied.

[0243] It should be noted that all of the aforementioned criteria regarding sequence position specifics are with respect to the 5′ end of the sense strand. Reference is made to the sense strand, because most databases contain information that describes the information of the mRNA. Because according to the present invention a chain can be from 18 to 30 bases in length, and the aforementioned criteria assumes a chain 19 base pairs in length, it is important to keep the aforementioned criteria applicable to the correct bases.

[0244] When there are only 18 bases, the base pair that is not present is the base pair that is located at the 3′ of the sense strand. When there are twenty to thirty bases present, then additional bases are added at the 5′ end of the sense chain and occupy positions ⁻1 to ⁻11. Accordingly, with respect to SEQ. ID NO. 0001 NNANANNNNUCNAANNNNA and SEQ. ID NO. 0028 GUCNNANANNNNUCNAANNNNA, both would have A at position 3, A at position 5, U at position 10, C at position 11, A and position 13, A and position 14 and A at position 19. However, SEQ. ID NO. 0028 would also have C at position −1, U at position −2 and G at position −3.

[0245] For a 19 base pair siRNA, an optimal sequence of one of the strands may be represented below, where N is any base, A, C, G, or U:

| | |
|---|---|
| SEQ. ID NO. 0001. | NNANANNNNUCNAANNNNA |
| SEQ. ID NO. 0002. | NNANANNNNUGNAANNNNA |
| SEQ. ID NO. 0003. | NNANANNNNUUNAANNNNA |
| SEQ. ID NO. 0004. | NNANANNNNUCNCANNNNA |
| SEQ. ID NO. 0005. | NNANANNNNUGNCANNNNA |
| SEQ. ID NO. 0006. | NNANANNNNUUNCANNNNA |
| SEQ. ID NO. 0007. | NNANANNNNUCNUANNNNA |
| SEQ. ID NO. 0008. | NNANANNNNUGNUANNNNA |
| SEQ. ID NO. 0009. | NNANANNNNUUNUANNNNA |
| SEQ. ID NO. 0010. | NNANCNNNNUCNAANNNNA |
| SEQ. ID NO. 0011. | NNANCNNNNUGNAANNNNA |
| SEQ. ID NO. 0012. | NNANCNNNNUUNAANNNNA |
| SEQ. ID NO. 0013. | NNANCNNNNUCNCANNNNA |
| SEQ. ID NO. 0014. | NNANCNNNNUGNCANNNNA |
| SEQ. ID NO. 0015. | NNANCNNNNUUNCANNNNA |
| SEQ. ID NO. 0016. | NNANCNNNNUCNUANNNNA |
| SEQ. ID NO. 0017. | NNANCNNNNUGNUANNNNA |
| SEQ. ID NO. 0018. | NNANCNNNNUUNUANNNNA |
| SEQ. ID NO. 0019. | NNANGNNNNUCNAANNNNA |
| SEQ. ID NO. 0020. | NNANGNNNNUGNAANNNNA |
| SEQ. ID NO. 0021. | NNANGNNNNUUNAANNNNA |
| SEQ. ID NO. 0022. | NNANGNNNNUCNCANNNNA |
| SEQ. ID NO. 0023. | NNANGNNNNUGNCANNNNA |
| SEQ. ID NO. 0024. | NNANGNNNNUUNCANNNNA |
| SEQ. ID NO. 0025. | NNANGNNNNUCNUANNNNA |
| SEQ. ID NO. 0026. | NNANGNNNNUGNUANNNNA |
| SEQ. ID NO. 0027. | NNANGNNNNNUNUANNNNA |

[0246] In one embodiment, the sequence used as an siRNA is selected by choosing the siRNA that score highest according to one of the following seven algorithms that are represented by Formulas I-VII:
Relative functionality of siRNA=−(GC/3)+(AU₁₅₋₁₉)−(Tm_{20° C.})*3−(G₁₃)*3−(C₁₉)+(A₁₉)*2+(A₃)+(U₁₀)+(A₁₄)−(U₅)−(A₁₁) Formula I
Relative functionality of siRNA=−(GC/3)−(AU₁₅₋₁₉)*3−(G₁₃)*3−(C₁₉)+(A₁₉)*2+(A₃) Formula II
Relative functionality of siRNA=−(GC/3)+(AU₁₅₋₁₉)−(Tm_{20° C.})*3 Formula III
Relative functionality of siRNA=−GC/2+(AU₁₅₋₁₉)/2−(Tm_{20° C.})*2−(G₁₃)*3−(C₁₉)+(A₁₉)*2+(A₃)+(U₁₀)+(A₁₄)−(U₅)−(A₁₁) Formula IV
Relative functionality of siRNA=(G₁₃)*3−(C₁₉)+(A₁₉)*2+(A₃)+(U₁₀)+(A₁₄)−(U₅)−(A₁₁) Formula V
Relative functionality of siRNA=−(G₁₃)*3−(C₁₉)+(A₁₉)*2+(A₃) Formula VI
Relative functionality of siRNA=−(GC/2)+(AU₁₅₋₁₉)/2−(Tm_{20° C.})*1−(G₁₃)*3−(C₁₉)+(A₁₉)*3+(A₃)*3+(U₁₀)/2+(A₁₄)/2−(U₅)/2−(A₁₁)/2 Formula VII

[0247] In Formulas I-VII:

[0248] wherein A₁₉=1 if A is the base at position 19 on the sense strand, otherwise its value is 0,

[0249] AU₁₅₋₁₉=0-5 depending on the number of A or U bases on the sense strand at positions 15-19;

[0250] G₁₃=1 if G is the base at position 13 on the sense strand, otherwise its value is 0;

[0251] C₁₉=1 if C is the base at position 19 of the sense strand, otherwise its value is 0;

[0252] GC=the number of G and C bases in the entire sense strand;

[0253] Tm_{20° C.}=1 if the Tm is greater than 20° C.;

A₃=1 if A is the base at position 3 on the sense strand, otherwise its value is 0;

U₁₀=1 if U is the base at position 10 on the sense strand, otherwise its value is 0;

A₁₄=1 if A is the base at position 14 on the sense strand, otherwise its value is 0;

U₅=1 if U is the base at position 5 on the sense strand, otherwise its value is 0; and

A₁₁=1 if A is the base at position 11 of the sense strand, otherwise its value is 0.

[0254] Formulas I-VII provide relative information regarding functionality. When the values for two sequences are compared for a given formula, the relative functionality is ascertained; a higher positive number indicates a greater functionality. For example, in many applications a value of 5 or greater is beneficial.

[0255] Additionally, in many applications, more than one of these formulas would provide useful information as to the relative functionality of potential siRNA sequences. However, it is beneficial to have more than one type of formula, because not every formula will be able to help to differentiate among potential siRNA sequences. For example, in particularly high GC mRNAs, formulas that take that parameter into account would not be useful and application of formulas that lack GC elements (e.g., formulas V and VI) might provide greater insights into duplex functionality. Similarly, formula II might by used in situations where hairpin structures are not observed in duplexes, and formula IV might be applicable for sequences that have higher AU content. Thus, one may consider a particular sequence in light of more than one or even all of these algorithms to obtain the best differentiation among sequences. In some instances, application of a given algorithm may identify an unusually large number of potential siRNA sequences, and in those cases, it may be appropriate to re-analyze that sequence with a second algorithm that is, for instance, more stringent. Alternatively, it is conceivable that analysis of a sequence with a given formula yields no acceptable siRNA sequences (i.e. low SMARTSCORES™, or siRNA ranking). In this instance, it may be appropriate to re-analyze that sequences with a second algorithm that is, for instance, less stringent. In still other instances, analysis of a single sequence with two separate formulas may give rise to conflicting results (i.e. one formula generates a set of siRNA with high SMARTSCORES™, or siRNA ranking, while the other formula identifies a set of siRNA with low SMARTSCORES™, or siRNA ranking). In these instances, it may be necessary to determine which weighted factor(s) (e.g. GC content) are contributing to the discrepancy and assessing the sequence to decide whether these factors Should or should not be included. Alternatively, the sequence could be analyzed by a third, fourth, or fifth algorithm to identify a set of rationally designed siRNA.

[0256] The above-referenced criteria are particularly advantageous when used in combination with pooling techniques as depicted in Table 1:

TABLE I
FUNCTIONAL PROBABILITY

| | OLIGOS | | | POOLS | | |
|---|---|---|---|---|---|---|
| CRITERIA | >95% | >80% | <70% | >95% | >80% | <70% |
| CURRENT | 33.0 | 50.0 | 23.0 | 79.5 | 97.3 | 0.3 |
| NEW | 50.0 | 88.5 | 8.0 | 93.8 | 99.98 | 0.005 |
| (GC) | 28.0 | 58.9 | 36.0 | 72.8 | 97.1 | 1.6 |

[0257] The term “current” used in Table I refers to Tuschl's conventional siRNA parameters (Elbashir, S. M. et al. (2002) “Analysis of gene function in somatic mammalian cells using small interfering RNAs” Methods 26: 199-213). “New” refers to the design parameters described in Formulas I-VII. “GC” refers to criteria that select siRNA solely on the basis of GC content.

[0258] As Table I indicates, when more functional siRNA duplexes are chosen, siRNAs that produce <70% silencing drops from 23% to 8% and the number of siRNA duplexes that produce >80% silencing rises from 50% to 88.5%. Further, of the siRNA duplexes with >80% silencing, a larger portion of these siRNAs actually silence >95% of the target expression (the new criteria increases the portion from 33% to 50%). Using this new criteria in pooled siRNAs, shows that, with pooling, the amount of silencing >95% increases from 79.5% to 93.8% and essentially eliminates any siRNA pool from silencing less than 70%.

[0259] Table II similarly shows the particularly beneficial results of pooling in combination with the aforementioned criteria. However, Table II, which takes into account each of the aforementioned variables, demonstrates even a greater degree of improvement in functionality.

TABLE II
FUNCTIONAL PROBABILITY

| | OLIGOS | | | POOLS | | |
|---|---|---|---|---|---|---|
| | | | NON- | | | NON- |
| | FUNCTIONAL | AVERAGE | FUNCTIONAL | FUNCTIONAL | AVERAGE | FUNCTIONAL |
| RANDOM | 20 | 40 | 50 | 67 | 97 | 3 |
| CRITERIA 1 | 52 | 99 | 0.1 | 97 | 93 | 0.0040 |
| CRITERIA 4 | 89 | 99 | 0.1 | 99 | 99 | 0.0000 |

[0260] The terms “functional,” “Average,” and “Non-functional” used in Table II, refer to siRNA that exhibit >80%, >50%, and <50% functionality, respectively. Criteria 1 and 4 refer to specific criteria described above.

[0261] The above-described algorithms may be used with or without a computer program that allows for the inputting of the sequence of the mRNA and automatically outputs the optimal siRNA. The computer program may, for example, be accessible from a local terminal or personal computer, over an internal network or over the Internet.

[0262] In addition to the formulas above, more detailed algorithms may be used for selecting siRNA. Preferably, at least one RNA duplex of 18-30 base pairs is selected such that it is optimized according a formula selected from:
(−14)*G₁₃−13*A₁−12*U₇−11*U₂−10*A₁₁−10*U₄−10*C₃−10*C₅−10*C₆−9*A₁₀−9*U₉−9*C₁₈−8*G₁₀−7*U₁−7*U₁₆−7*C₁₇−7*C₁₉+7*U₁₇+8*A₂+8*A₄+8*A₅+8*C₄+9*G₈+10*A₇+10*U₁₈+11*A₁₉+11*C₉+15*G₁+18*A₃+19*U₁₀−Tm−3*(GCₜₒₜₐₗ)−6*(GC₁₅₋₁₉)−30*X; or Formula VIII
(14.1)*A₃+(14.9)*A₆(17.6)*A₁₃+(24.7)*A₁₉+(14.2)*U₁₀+(10.5)*C₉+(23.9)*G₁+(16.3)*G₂+(−12.3)*A₁₁+(−19.3)*U₁+(−12.1)*U₂+(−11)*U₃+(−15.2)*U₁₅+(−11.3)*U₁₆+(−11.8)*C₃+(−17.4)*C₆+(−10.5)*C₇+(−13.7)*G₁₃+(−25.9)*G₁₉−Tm−3*(GCₜₒₜₐₗ)−6*(GC₁₅₋₁₉)−30*X; and Formula IX
(−8)*A1+(−1)*A2+(12)*A3+(7)*A4+(18)*A5+(12)*A6+(19)*A7+(6)*A8+(−4)*A9+(−5)*A10+(−2)*A11+(−5)*A12+(17)*A13+(−3)*A14+(4)*A15+(2)*A16+(8)*A17+(11)*A18+(30)*A19+(−13)*U1+(−10)*U2+(2)*U3+(−2)*U4+(−5)*U5+(5)*U6+(−2)*U7+(−10)*U8+(−5)*U9+(15)*U10+(−1)*U11+(0)*U12+(10)*U13+(−9)*U14+(−13)*U15+(−10)*U16+(3)*U17+(9)*U18+(9)*U19+(7)*C1+(3)*C2+(−21)*C3+(5)*C4+(−9)*C5+(−20)*C6+(−18)*C7+(−5)*C8+(5)*C9+(1)*C10+(2)*C11+(−5)*C12+(−3)*C13+(−6)*C14+(−2)*C15+(−5)*C16+(−3)*C17+(−12)*C18+(−18)*C19+(14)*G1+(8)*G2+(7)*G3+(−10)*G4+(−4)*G5+(2)*G6+(1)*G7+(9)*G8+(5)*G9+(−11)*G10+(1)*G11+(9)*G12+(−24)*G13+(18)*G14+(11)*G15+(13)*G16+(−7)*G17+(−9)*G18+(−22)*G19+6*(number of A+U in position 15-19)−3*(number of G+C in whole siRNA). Formula X

[0263] wherein

[0264] A₁=1 if A is the base at position 1 of the sense strand, otherwise its value is 0;

[0265] A₂=1 if A is the base at position 2 of the sense strand, otherwise its value is 0;

[0266] A₃=1 if A is the base at position 3 of the sense strand, otherwise its value is 0;

[0267] A₄=1 if A is the base at position 4 of the sense strand, otherwise its value is 0;

[0268] A₅=1 if A is the base at position 5 of the sense strand, otherwise its value is 0;

[0269] A₆=1 if A is the base at position 6 of the sense strand, otherwise its value is 0;

[0270] A₇=1 if A is the base at position 7 of the sense strand, otherwise its value is 0;

[0271] A₁₀=1 if A is the base at position 10 of the sense strand, otherwise its value is 0;

[0272] A₁₁=1 if A is the base at position 11 of the sense strand, otherwise its value is 0;

[0273] A₁₃=1 if A is the base at position 13 of the sense strand, otherwise its value is 0;

[0274] A₁₉=1 if A is the base at position 19 of the sense strand, otherwise if another base is present or the sense strand is only 18 base pairs in length, its value is 0;

[0275] C₃=1 if C is the base at position 3 of the sense strand, otherwise its value is 0;

[0276] C₄=1 if C is the base at position 4 of the sense strand, otherwise its value is 0;

[0277] C₅=1 if C is the base at position 5 of the sense strand, otherwise its value is 0;

[0278] C₆=1 if C is the base at position 6 of the sense strand, otherwise its value is 0;

[0279] C₇=1 if C is the base at position 7 of the sense strand, otherwise its value is 0;

[0280] C₉=1 if C is the base at position 9 of the sense strand, otherwise its value is 0;

[0281] C₁₇=1 if C is the base at position 17 of the sense strand, otherwise its value is 0;

[0282] C₁₈=1 if C is the base at position 18 of the sense strand, otherwise its value is 0;

[0283] C₁₉=1 if C is the base at position 19 of the sense strand, otherwise if another base is present or the sense strand is only 18 base pairs in length, its value is 0;

[0284] G₁=1 if G is the base at position 1 on the sense strand, otherwise its value is 0;

[0285] G₂=1 if G is the base at position 2 of the sense strand, otherwise its value is 0;

[0286] G₈=1 if G is the base at position 8 on the sense strand, otherwise its value is 0;

[0287] G₁₀=1 if G is the base at position 10 on the sense strand, otherwise its value is 0;

[0288] G₁₃=1 if G is the base at position 13 on the sense strand, otherwise its value is 0;

[0289] G₁₉=1 if G is the base at position 19 of the sense strand, otherwise if another base is present or the sense strand is only 18 base pairs in length, its value is 0;

[0290] U₁=1 if U is the base at position 1 on the sense strand, otherwise its value is 0;

[0291] U₂=1 if U is the base at position 2 on the sense strand, otherwise its value is 0;

[0292] U₃=1 if U is the base at position 3 on the sense strand, otherwise its value is 0;

[0293] U₄=1 if U is the base at position 4 on the sense strand, otherwise its value is 0;

[0294] U₇=1 if U is the base at position 7 on the sense strand, otherwise its value is 0;

[0295] U₉=1 if U is the base at position 9 on the sense strand, otherwise its value is 0;

[0296] U₁₀=1 if U is the base at position 10 on the sense strand, otherwise its value is 0;

[0297] U₁₅=1 if U is the base at position 15 on the sense strand, otherwise its value is 0;

[0298] U₁₆=1 if U is the base at position 16 on the sense strand, otherwise its value is 0;

[0299] U₁₇=1 if U is the base at position 17 on the sense strand, otherwise its value is 0;

[0300] U₁₈=1 if U is the base at position 18 on the sense strand, otherwise its value is 0;

[0301] GC₁₅₋₁₉=the number of G and C bases within positions 15-19 of the sense strand, or within positions 15-18 if the sense strand is only 18 base pairs in length;

[0302] GCₜₒₜₐₗ=the number of G and C bases in the sense strand;

[0303] Tm=100 if the siRNA oligo has the internal repeat longer then 4 base pairs, otherwise its value is 0; and

[0304] X=the number of times that the same nucleotide repeats four or more times in a row.

[0305] The above formulas VIII, IX, and X, as well as formulas I-VII, provide methods for selecting siRNA in order to increase the efficiency of gene silencing. A subset of variables of any of the formulas may be used, though when fewer variables are used, the optimization hierarchy becomes less reliable.

[0306] With respect to the variables of the above-referenced formulas, a single letter of A or C or G or U followed by a subscript refers to a binary condition. The binary condition is that either the particular base is present at that particular position (wherein the value is “1”) or the base is not present (wherein the value is “0”). Because position 19 is optional, i.e., there might be only 18 base pairs, when there are only 18 base pairs, any base with a subscript of 19 in the formulas above would have a zero value for that parameter. Before or after each variable is a number followed by *, which indicates that the value of the variable is to be multiplied or weighed by that number.

[0307] The numbers preceding the variables A, or G, or C, or U in Formulas VIII, IX, and X (or after the variables in Formula I-VII) were determined by comparing the difference in the frequency of individual bases at different positions in functional siRNA and total siRNA. Specifically, the frequency in which a given base was observed at a particular position in functional groups was compared with the frequency that that same base was observed in the total, randomly selected siRNA set. If the absolute value of the difference between the functional and total values was found to be greater than 6%, that parameter was included in the equation. Thus, for instance, if the frequency of finding a “G” at position 13 (G₁₃) is found to be 6% in a given functional group, and the frequency of G₁₃ in the total population of siRNAs is 20%, the difference between the two values is 6%−20%=−14%. As the absolute value is greater than six (6), this factor (−14) is included in the equation. Thus, in Formula VIII, in cases where the siRNA under study has a G in position 13, the accrued value is (−14)*(1)=−14. In contrast, when a base other than G is found at position 13, the accrued value is (−14)*(0)=0.

[0308] When developing a means to optimize siRNAs, the inventors observed that a bias toward low internal thermodynamic stability of the duplex at the 5′-antisense (AS) end is characteristic of naturally occurring miRNA precursors. The inventors extended this observation to siRNAs for which functionality had been assessed in tissue culture.

[0309] With respect to the parameter GC₁₅₋₁₉, a value of 0-5 will be ascribed depending on the number of G or C bases at positions 15 to 19. If there are only 18 base pairs, the value is between 0 and 4.

[0310] With respect to the criterion GCₜₒₜₐₗ content, a number from 0-30 will be ascribed, which correlates to the total number of G and C nucleotides on the sense strand, excluding overhangs. Without wishing to be bound by any one theory, it is postulated that the significance of the GC content (as well as AU content at positions 15-19, which is a parameter for formulas III-VII) relates to the easement of the unwinding of a double-stranded siRNA duplex. Duplex unwinding is believed to be crucial for siRNA functionality in vivo and overall low internal stability, especially low internal stability of the first unwound base pair is believed to be important to maintain sufficient processivity of RISC complex-induced duplex unwinding. If the duplex has 19 base pairs, those at positions 15-19 on the sense strand will unwind first if the molecule exhibits a sufficiently low internal stability at that position. As persons skilled in the art are aware, RISC is a complex of approximately twelve proteins; Dicer is one, but not the only, helicase within this complex. Accordingly, although the GC parameters are believed to relate to activity with Dicer, they are also important for activity with other RISC proteins.

[0311] The value of the parameter Tm is 0 when there are no internal repeats longer than (or equal to) four base pairs present in the siRNA duplex; otherwise the value is 1. Thus for example, if the sequence ACGUACGU, or any other four nucleotide (or more) palindrome exists within the structure, the value will be one (1). Alternatively if the structure ACGGACG, or any other 3 nucleotide (or less) palindrome exists, the value will be zero (0).

[0312] The variable “X” refers to the number of times that the same nucleotide occurs contiguously in a stretch of four or more units. If there are, for example, four contiguous As in one part of the sequence and elsewhere in the sequence four contiguous Cs, X=2. Further, if there are two separate contiguous stretches of four of the same nucleotides or eight or more of the same nucleotides in a row, then X=2. However, X does not increase for five, six or seven contiguous nucleotides.

[0313] Again, when applying Formula VIII, Formula IX, or Formula X, to a given mRNA, (the “target RNA” or “target molecule”), one may use a computer program to evaluate the criteria for every sequence of 18-30 base pairs or only sequences of a fixed length, e.g., 19 base pairs. Preferably the computer program is designed such that it provides a report ranking of all of the potential siRNAs 18-30 base pairs, ranked according to which sequences generate the highest value. A higher value refers to a more efficient siRNA for a particular target gene. The computer program that may be used may be developed in any computer language that is known to be useful for scoring nucleotide sequences, or it may be developed with the assistance of commercially available product such as Microsoft's PRODUCT.NET. Additionally, rather than run every sequence through one and/or another formula, one may compare a subset of the sequences, which may be desirable if for example only a subset are available. For instance, it may be desirable to first perform a BLAST (Basic Local Alignment Search Tool) search and to identify sequences that have no homology to other targets. Alternatively, it may be desirable to scan the sequence and to identify regions of moderate GC context, then perform relevant calculations using one of the above-described formulas on these regions. These calculations can be done manually or with the aid of a computer.

[0314] As with Formulas I-VII, either Formula VIII, Formula IX, or Formula X may be used for a given mRNA target sequence. However, it is possible that according to one or the other formula more than one siRNA will have the same value. Accordingly, it is beneficial to have a second formula by which to differentiate sequences. Formulas IX and X were derived in a similar fashion as Formula VIII, yet used a larger data set and thus yields sequences with higher statistical correlations to highly functional duplexes. The sequence that has the highest value ascribed to it may be referred to as a “first optimized duplex.” The sequence that has the second highest value ascribed to it may be referred to as a “second optimized duplex.” Similarly, the sequences that have the third and fourth highest values ascribed to them may be referred to as a third optimized duplex and a fourth optimized duplex, respectively. When more than one sequence has the same value, each of them may, for example, be referred to as first optimized duplex sequences or co-first optimized duplexes. Formula X is similar to Formula IX, yet uses a greater numbers of variables and for that reason, identifies sequences on the basis of slightly different criteria.

[0315] It should also be noted that the output of a particular algorithm will depend on several of variables including: (1) the size of the data base(s) being analyzed by the algorithm, and (2) the number and stringency of the parameters being applied to screen each sequence. Thus, for example, in U.S. patent application Ser. No. 10/714,333, entitled “Functional and Hyperfunctional siRNA,” filed Nov. 14, 2003, Formula VIII was applied to the known human genome (NCBI REFSEQ database) through ENTREZ (EFETCH). As a result of these procedures, roughly 1.6 million siRNA sequences were identified. Application of Formula VIII to the same database in March of 2004 yielded roughly 2.2 million sequences, a difference of approximately 600,000 sequences resulting from the growth of the database over the course of the months that span this period of time. Application of other formulas (e.g., Formula X) that change the emphasis of, include, or eliminate different variables can yield unequal numbers of siRNAs. Alternatively, in cases where application of one formula to one or more genes fails to yield sufficient numbers of siRNAs with scores that would be indicative of strong silencing, said genes can be reassessed with a second algorithm that is, for instance, less stringent.

[0316] siRNA sequences identified using Formula VIII and Formula X (minus sequences generated by Formula VIII) are contained within the sequence listing. The data included in the sequence listing is described more fully below. The sequences identified by Formula VIII and Formula X that are disclosed in the sequence listing may be used in gene silencing applications.

[0317] It should be noted that for Formulas VIII, IX, and X all of the aforementioned criteria are identified as positions on the sense strand when oriented in the 5′ to 3′ direction as they are identified in connection with Formulas I-VII unless otherwise specified.

[0318] Formulas I-X, may be used to select or to evaluate one, or more than one, siRNA in order to optimize silencing. Preferably, at least two optimized siRNAs that have been selected according to at least one of these formulas are used to silence a gene, more preferably at least three and most preferably at least four. The siRNAs may be used individually or together in a pool or kit. Further, they may be applied to a cell simultaneously or separately. Preferably, the at least two siRNAs are applied simultaneously. Pools are particularly beneficial for many research applications. However, for therapeutics, it may be more desirable to employ a single hyperfunctional siRNA as described elsewhere in this application.

[0319] When planning to conduct gene silencing, and it is necessary to choose between two or more siRNAs, one should do so by comparing the relative values when the siRNA are subjected to one of the formulas above. In general a higher scored siRNA should be used.

[0320] Useful applications include, but are not limited to, target validation, gene functional analysis, research and drug discovery, gene therapy and therapeutics. Methods for using siRNA in these applications are well known to persons of skill in the art.

[0321] Because the ability of siRNA to function is dependent on the sequence of the RNA and not the species into which it is introduced, the present invention is applicable across a broad range of species, including but not limited to all mammalian species, such as humans, dogs, horses, cats, cows, mice, hamsters, chimpanzees and gorillas, as well as other species and organisms such as bacteria, viruses, insects, plants and C. elegans.

[0322] The present invention is also applicable for use for silencing a broad range of genes, including but not limited to the roughly 45,000 genes of a human genome, and has particular relevance in cases where those genes are associated with diseases such as diabetes, Alzheimer's, cancer, as well as all genes in the genomes of the aforementioned organisms.

[0323] The siRNA selected according to the aforementioned criteria or one of the aforementioned algorithms are also, for example, useful in the simultaneous screening and functional analysis of multiple genes and gene families using high throughput strategies, as well as in direct gene suppression or silencing.

Development of the Algorithms

[0324] To identify siRNA sequence features that promote functionality and to quantify the importance of certain currently accepted conventional factors—such as G/C content and target site accessibility—the inventors synthesized an siRNA panel consisting of 270 siRNAs targeting three genes, Human Cyclophilin, Firefly Luciferase, and Human DBI. In all three cases, siRNAs were directed against specific regions of each gene. For Human Cyclophilin and Firefly Luciferase, ninety siRNAs were directed against a 199 bp segment of each respective mRNA. For DBI, 90 siRNAs were directed against a smaller, 109 base pair region of the mRNA. The sequences to which the siRNAs were directed are provided below.

[0325] It should be noted that in certain sequences, “t” is present. This is because many databases contain information in this manner. However, the t denotes a uracil residue in mRNA and siRNA. Any algorithm will, unless otherwise specified, process at in a sequence as a u.

Human cyclophilin: 193-390, M60857
SEQ. ID NO. 29:
gttccaaaaa cagtggataa ttttgtggcc ttagctacag
gagagaaagg atttggctac aaaaacagca aattccatcg
tgtaatcaag gacttcatga tccagggcgg agacttcacc
aggggagatg gcacaggagg aaagagcatc tacggtgagc
gcttccccga tgagaacttc aaactgaagc actacgggcc
tggctggg
Firefly luciferase: 1434-1631, U47298
(pGL3, Promega)
SEQ. ID NO. 30:
tgaacttccc gccgccgttg ttgttttgga gcacggaaag
acgatgacgg aaaaagagat cgtggattac gtcgccagtc
aagtaacaac cgcgaaaaag ttgcgcggag gagttgtgtt
tgtggacgaa gtaccgaaag gtcttaccgg aaaactcgac
gcaagaaaaa tcagagagat cctcataaag gccaagaagg
DBI, NM_020548 (202-310) (every position)
SEQ. ID NO. 0031:
acgggcaagg ccaagtggga tgcctggaat gagctgaaag
ggacttccaa ggaagatgcc atgaaagctt acatcaacaa
agtagaagag ctaaagaaaa aatacggg

[0326] A list of the siRNAs appears in Table III (see Examples Section, Example II)

[0327] The set of duplexes was analyzed to identify correlations between siRNA functionality and other biophysical or thermodynamic properties. When the siRNA panel was analyzed in functional and non-functional subgroups, certain nucleotides were much more abundant at certain positions in functional or non-functional groups. More specifically, the frequency of each nucleotide at each position in highly functional siRNA duplexes was compared with that of nonfunctional duplexes in order to assess the preference for or against any given nucleotide at every position. These analyses were used to determine important criteria to be included in the siRNA algorithms (Formulas VIII, IX, and X).

[0328] The data set was also analyzed for distinguishing biophysical properties of siRNAs in the functional group, such as optimal percent of GC content, propensity for internal structures and regional thermodynamic stability. Of the presented criteria, several are involved in duplex recognition, RISC activation/duplex unwinding, and target cleavage catalysis.

[0329] The original data set that was the source of the statistically derived criteria is shown in FIG. 2. Additionally, this figure shows that random selection yields siRNA duplexes with unpredictable and widely varying silencing potencies as measured in tissue culture using HEK293 cells. In the figure, duplexes are plotted such that each x-axis tick-mark represents an individual siRNA, with each subsequent siRNA differing in target position by two nucleotides for Human Cyclophilin B and Firefly Luciferase, and by one nucleotide for Human DBI. Furthermore, the y-axis denotes the level of target expression remaining after transfection of the duplex into cells and subsequent silencing of the target.

[0330] siRNA identified and optimized in this document work equally well in a wide range of cell types. FIG. 3a shows the evaluation of thirty siRNAs targeting the DBI gene in three cell lines derived from different tissues. Each DBI siRNA displays very similar functionality in HEK293 (ATCC, CRL-1573, human embryonic kidney), HeLa (ATCC, CCL-2, cervical epithelial adenocarcinoma) and DU145 (HTB-81, prostate) cells as determined by the B-DNA assay. Thus, siRNA functionality is determined by the primary sequence of the siRNA and not by the intracellular environment. Additionally, it should be noted that although the present invention provides for a determination of the functionality of siRNA for a given target, the same siRNA may silence more than one gene. For example, the complementary sequence of the silencing siRNA may be present in more than one gene. Accordingly, in these circumstances, it may be desirable not to use the siRNA with highest SMARTSCORE™, or siRNA ranking. In such circumstances, it may be desirable to use the siRNA with the next highest SMARTSCORE™, or siRNA ranking.

[0331] To determine the relevance of G/C content hi siRNA function, the G/C content of each duplex in the panel was calculated and the functional classes of siRNAs (<F50, ≧F50, ≧F80, ≧F95 where F refers to the percent gene silencing) were sorted accordingly. The majority of the highly-functional siRNAs (≧F95) fell within the G/C content range of 36%-52% (FIG. 3B). Twice as many non-functional (<F50) duplexes fell within the high G/C content groups (>57% GC content) compared to the 36%-52% group. The group with extremely low GC content (26% or less) contained a higher proportion of non-functional siRNAs and no highly-functional siRNAs. The G/C content range of 30%-52% was therefore selected as Criterion 1 for siRNA functionality, consistent with the observation that a G/C range 30%-70% promotes efficient RNAi targeting. Application of this criterion alone provided only a marginal increase in the probability of selecting functional siRNAs from the panel: selection of F50 and F95 siRNAs was improved by 3.6% and 2.2%, respectively. The siRNA panel presented here permitted a more systematic analysis and quantification of the importance of this criterion than that used previously.

[0332] A relative measure of local internal stability is the A/U base pair (bp) content; therefore, the frequency of A/U bp was determined for each of the five terminal positions of the duplex (5′ sense (S)/5′ antisense (AS)) of all siRNAs in the panel. Duplexes were then categorized by the number of A/U bp in positions 1-5 and 15-19 of the sense strand. The thermodynamic flexibility of the duplex 5′-end (positions 1-5; S) did not appear to correlate appreciably with silencing potency, while that of the 3′-end (positions 15-19; S) correlated with efficient silencing. No duplexes lacking A/U bp in positions 15-19 were functional. The presence of one A/U bp in this region conferred some degree of functionality, but the presence of three or more A/Us was preferable and therefore defined as Criterion II. When applied to the test panel, only a marginal increase in the probability of functional siRNA selection was achieved: a 1.8% and 2.3% increase for F50 and F95 duplexes, respectively (Table IV).

[0333] The complementary strands of siRNAs that contain internal repeats or palindromes may form internal fold-back structures. These hairpin-like structures exist in equilibrium with the duplexed form effectively reducing the concentration of functional duplexes. The propensity to form internal hairpins and their relative stability can be estimated by predicted melting temperatures. High Tm reflects a tendency to form hairpin structures. Lower Tm values indicate a lesser tendency to form hairpins. When the functional classes of siRNAs were sorted by Tₘ (FIG. 3c), the following trends were identified: duplexes lacking stable internal repeats were the most potent silencers (no F95 duplex with predicted hairpin structure Tₘ>60° C.). In contrast, about 60% of the duplexes in the groups having internal hairpins with calculated Tₘ values less than 20° C. were F80. Thus, the stability of internal repeats is inversely proportional to the silencing effect and defines Criterion III (predicted hairpin structure Tₘ≦20° C.).

Sequence-Based Determinants of siRNA Functionality

[0334] When the siRNA panel was sorted into functional and non-functional groups, the frequency of a specific nucleotide at each position in a functional siRNA duplex was compared with that of a nonfunctional duplex in order to assess the preference for or against a certain nucleotide. FIG. 4 shows the results of these queries and the subsequent resorting of the data set (from FIG. 2). The data is separated into two sets: those duplexes that meet the criteria, a specific nucleotide in a certain position—grouped on the left (Selected) and those that do not—grouped on the right (Eliminated). The duplexes are further sorted from most functional to least functional with the y-axis of FIG. 4a-e representing the % expression i.e., the amount of silencing that is elicited by the duplex (Note: each position on the X-axis represents a different duplex). Statistical analysis revealed correlations between silencing and several sequence-related properties of siRNAs. FIG. 4 and Table IV show quantitative analysis for the following five sequence-related properties of siRNA: (A) an A at position 19 of the sense strand; (B) an A at position 3 of the sense strand; (C) a U at position 10 of the sense strand; (D) a base other than G at position 13 of the sense strand; and (E) a base other than C at position 19 of the sense strand.

[0335] When the siRNAs in the panel were evaluated for the presence of an A at position 19 of the sense strand, the percentage of non-functional duplexes decreased from 20% to 11.8%, and the percentage of F95 duplexes increased from 21.7% to 29.4% (Table IV). Thus, the presence of an A in this position defined Criterion IV.

[0336] Another sequence-related property correlated with silencing was the presence of an A in position 3 of the sense strand (FIG. 4b). Of the siRNAs with A3, 34.4% were F95, compared with 21.7% randomly selected siRNAs. The presence of a U base in position 10 of the sense strand exhibited an even greater impact (FIG. 4c). Of the duplexes in this group, 41.7% were F95. These properties became criteria V and VI, respectively.

[0337] Two negative sequence-related criteria that were identified also appear on FIG. 4. The absence of a G at position 13 of the sense strand, conferred a marginal increase in selecting functional duplexes (FIG. 4d). Similarly, lack of a C at position 19 of the sense strand also correlated with functionality (FIG. 4e). Thus, among functional duplexes, position 19 was most likely occupied by A, and rarely occupied by C. These rules were defined as criteria VII and VIII, respectively.

[0338] Application of each criterion individually provided marginal but statistically significant increases in the probability of selecting a potent siRNA. Although the results were informative, the inventors sought to maximize potency and therefore consider multiple criteria or parameters. Optimization is particularly important when developing therapeutics. Interestingly, the probability of selecting a functional siRNA based on each thermodynamic criteria was 2%-4% higher than random, but 4%-8% higher for the sequence-related determinates. Presumably, these sequence-related increases reflect the complexity of the RNAi mechanism and the multitude of protein-RNA interactions that are involved in RNAi-mediated silencing.

TABLE IV

| | | | | IMPROVEMENT |
|---|---|---|---|---|
| | | PERCENT | | OVER |
| CRITERION | | FUNCTIONAL | | RANDOM (%) |
| I. | 30%-52% G/C Content | <F50 | 16.4 | −3.6 |
| | | ≧F50 | 83.6 | 3.6 |
| | | ≧F80 | 60.4 | 4.3 |
| | | ≧F95 | 23.9 | 2.2 |
| II. | At least 3 A/U | <F50 | 18.2 | −1.8 |
| | bases at positions | ≧F50 | 81.8 | 1.8 |
| | 15-19 of the sense | ≧F80 | 59.7 | 3.6 |
| | strand | ≧F95 | 24.0 | 2.3 |
| III. | Absence of internal | <F50 | 16.7 | −3.3 |
| | repeats, as measured | ≧F50 | 83.3 | 3.3 |
| | by Tm of secondary | ≧F80 | 61.1 | 5.0 |
| | structure ≦20° C. | ≧F95 | 24.6 | 2.9 |
| IV. | An A base at | <F50 | 11.8 | −8.2 |
| | position 19 | ≧F50 | 88.2 | 8.2 |
| | of the sense strand | ≧F80 | 75.0 | 18.9 |
| | | ≧F95 | 29.4 | 7.7 |
| V. | An A base at | <F50 | 17.2 | −2.8 |
| | position 3 of | ≧F50 | 82.8 | 2.8 |
| | the sense strand | ≧F80 | 62.5 | 6.4 |
| | | ≧F95 | 34.4 | 12.7 |
| VI. | A U base at | <F50 | 13.9 | −6.1 |
| | position 10 of | ≧F50 | 86.1 | 6.1 |
| | the sense strand | ≧F80 | 69.4 | 13.3 |
| | | ≧F95 | 41.7 | 20 |
| VII. | A base other than | <F50 | 18.8 | −1.2 |
| | C at position 19 | ≧F50 | 81.2 | 1.2 |
| | of the sense strand | ≧F80 | 59.7 | 3.6 |
| | | ≧F95 | 24.2 | 2.5 |
| VIII. | A base other than | <F50 | 15.2 | −4.8 |
| | G at position 13 | ≧F50 | 84.8 | 4.8 |
| | of the sense strand | ≧F80 | 61.4 | 5.3 |
| | | ≧F95 | 26.5 | 4.8 |

The siRNA Selection Algorithm

[0339] In an effort to improve selection further, all identified criteria, including but not limited to those listed in Table IV were combined into the algorithms embodied in Formula VIII, Formula IX, and Formula X. Each siRNA was then assigned a score (referred to as a SMARTSCORE™, or siRNA ranking) according to the values derived from the formulas. Duplexes that scored higher than 0 or −20 (unadjusted), for Formulas VIII and IX, respectively, effectively selected a set of functional siRNAs and excluded all non-functional siRNAs. Conversely, all duplexes scoring lower than 0 and −20 (minus 20) according to formulas VIII and IX, respectively, contained some functional siRNAs but included all non-functional siRNAs. A graphical representation of this selection is shown in FIG. 5. It should be noted that the scores derived from the algorithm can also be provided as “adjusted” scores. To convert Formula VIII unadjusted scores into adjusted scores it is necessary to use the following equation:
(160+unadjusted score)/2.25

[0340] When this takes place, an unadjusted score of “0” (zero) is converted to 75. Similarly, unadjusted scores for Formula X can be converted to adjusted scores. In this instance, the following equation is applied:
(228+unadjusted score)/3.56

[0341] When these manipulations take place, an unadjusted score of 38 is converted to an adjusted score of 75.

[0342] The methods for obtaining the seven criteria embodied in Table IV are illustrative of the results of the process used to develop the information for Formulas VIII, IX, and X. Thus similar techniques were used to establish the other variables and their multipliers. As described above, basic statistical methods were use to determine the relative values for these multipliers.

[0343] To determine the value for “Improvement over Random” the difference in the frequency of a given attribute (e.g., GC content, base preference) at a particular position is determined between individual functional groups (e.g., <F50) and the total siRNA population studied (e.g., 270 siRNA molecules selected randomly). Thus, for instance, in Criterion 1 (30%-52% GC content) members of the <F50 group were observed to have GC contents between 30-52% in 16.4% of the cases. In contrast, the total group of 270 siRNAs had GC contents in this range, 20% of the time. Thus for this particular attribute, there is a small negative correlation between 30%-52% GC content and this functional group (i.e., 16.4%-20%=−3.6%). Similarly, for Criterion VI, (a “U” at position 10 of the sense strand), the >F95 group contained a “U” at this position 41.7% of the time. In contrast, the total group of 270 siRNAs had a “U” at this position 21.7% of the time, thus the improvement over random is calculated to be 20% (or 41.7%-21.7%).

Identifying the Average Internal Stability Profile of Strong siRNA

[0344] In order to identify an internal stability profile that is characteristic of strong siRNA, 270 different siRNAs derived from the cyclophilin B, the diazepam binding inhibitor (DBI), and the luciferase gene were individually transfected into HEK293 cells and tested for their ability to induce RNAi of the respective gene. Based on their performance in the in vivo assay, the sequences were then subdivided into three groups, (i)>95% silencing; (ii) 80-95% silencing; and (iii) less than 50% silencing. Sequences exhibiting 51-84% silencing were eliminated from further consideration to reduce the difficulties in identifying relevant thermodynamic patterns.

[0345] Following the division of siRNA into three groups, a statistical analysis was performed on each member of each group to determine the average internal stability profile (AISP) of the siRNA. To accomplish this the Oligo 5.0 Primer Analysis Software and other related statistical packages (e.g., Excel) were exploited to determine the internal stability of pentamers using the nearest neighbor method described by Freier et al., (1986) Improved free-energy parameters for predictions of RNA duplex stability, Proc Natl. Acad. Sci. USA 83(24): 9373-7. Values for each group at each position were then averaged, and the resulting data were graphed on a linear coordinate system with the Y-axis expressing the ΔG (free energy) values in kcal/mole and the X-axis identifying the position of the base relative to the 5′ end.

[0346] The results of the analysis identified multiple key regions in siRNA molecules that were critical for successful gene silencing. At the 3′-most end of the sense strand (5′ antisense), highly functional siRNA (>95% gene silencing, see FIG. 6a, >F95) have a low internal stability (AISP of position 19=˜−7.6 kcal/mol). In contrast low-efficiency siRNA (i.e., those exhibiting less than 50% silencing, <F50) display a distinctly different profile, having high ΔG values (˜−8.4 kcal/mol) for the same position. Moving in a 5′ (sense strand) direction, the internal stability of highly efficient siRNA rises (position 12=˜−8.3 kcal/mole) and then drops again (position 7=˜−7.7 kcal/mol) before leveling off at a value of approximately −8.1 kcal/mol for the 5′ terminus. siRNA with poor silencing capabilities show a distinctly different profile. While the AISP value at position 12 is nearly identical with that of strong siRNAs, the values at positions 7 and 8 rise considerably, peaking at a high of ˜−9.0 kcal/mol. In addition, at the 5′ end of the molecule the AISP profile of strong and weak siRNA differ dramatically. Unlike the relatively strong values exhibited by siRNA in the >95% silencing group, siRNAs that exhibit poor silencing activity have weak AISP values (−7.6, −7.5, and −7.5 kcal/mol for positions 1, 2 and 3 respectively).

[0347] Overall the profiles of both strong and weak siRNAs form distinct sinusoidal shapes that are roughly 180° out-of-phase with each other. While these thermodynamic descriptions define the archetypal profile of a strong siRNA, it will likely be the case that neither the ΔG values given for key positions in the profile or the absolute position of the profile along the Y-axis (i.e., the ΔG-axis) are absolutes. Profiles that are shifted upward or downward (i.e., having on an average, higher or lower values at every position) but retain the relative shape and position of the profile along the X-axis can be foreseen as being equally effective as the model profile described here. Moreover, it is likely that siRNA that have strong or even stronger gene-specific silencing effects might have exaggerated ΔG values (either higher or lower) at key positions. Thus, for instance, it is possible that the 5′-most position of the sense strand (position 19) could have ΔG values of 7.4 kcal/mol or lower and still be a strong siRNA if, for instance, a G-C→G-T/U mismatch were substituted at position 19 and altered duplex stability. Similarly, position 12 and position 7 could have values above 8.3 kcal/mol and below 7.7 kcal/mole, respectively, without abating the silencing effectiveness of the molecule. Thus, for instance, at position 12, a stabilizing chemical modification (e.g., a chemical modification of the 2′ position of the sugar backbone) could be added that increases the average internal stability at that position. Similarly, at position 7, mismatches similar to those described previously could be introduced that would lower the ΔG values at that position.

[0348] Lastly, it is important to note that while functional and non-functional siRNA were originally defined as those molecules having specific silencing properties, both broader or more limiting parameters can be used to define these molecules. As used herein, unless otherwise specified, “non-functional siRNA” are defined as those siRNA that induce less than 50% (<50%) target silencing, “semi-functional siRNA” induce 50-79% target silencing, “functional siRNA” are molecules that induce 80-95% gene silencing, and “highly-functional siRNA” are molecules that induce great than 95% gene silencing. These definitions are not intended to be rigid and can vary depending upon the design and needs of the application. For instance, it is possible that a researcher attempting to map a gene to a chromosome using a functional assay, may identify an siRNA that reduces gene activity by only 30%. While this level of gene silencing may be “non-functional” for, e.g., therapeutic needs, it is sufficient for gene mapping purposes and is, under these uses and conditions, “functional.” For these reasons, functional siRNA can be defined as those molecules having greater than 10%, 20%, 30%, 40%, 50%, 60%, 70%, 80%, or 90% silencing capabilities at 100 nM transfection conditions. Similarly, depending upon the needs of the study and/or application, non-functional and semi-functional siRNA can be defined as having different parameters. For instance, semi-functional siRNA can be defined as being those molecules that induce 20%, 30%, 40%, 50%, 60%, or 70% silencing at 100 nM transfection conditions. Similarly, non-functional siRNA can be defined as being those molecules that silence gene expression by less than 70%, 60%, 50%, 40%, 30%, or less. Nonetheless, unless otherwise stated, the descriptions stated in the “Definitions” section of this text should be applied.

[0349] Functional attributes can be assigned to each of the key positions in the AISP of strong siRNA. The low 5′ (sense strand) AISP values of strong siRNAs may be necessary for determining which end of the molecule enters the RISC complex. In contrast, the high and low AISP values observed in the central regions of the molecule may be critical for siRNA-target mRNA interactions and product release, respectively.

[0350] If the AISP values described above accurately define the thermodynamic parameters of strong siRNA, it would be expected that similar patterns would be observed in strong siRNA isolated from nature. Natural siRNAs exist in a harsh, RNase-rich environment and it can be hypothesized that only those siRNA that exhibit heightened affinity for RISC (i.e., siRNA that exhibit an average internal stability profile similar to those observed in strong siRNA) would survive in an intracellular environment. This hypothesis was tested using GFP-specific siRNA isolated from N. benthamiana. Llave et al. (2002) Endogenous and Silencing-Associated Small RNAs in Plants, The Plant Cell 14, 1605-1619, introduced long double-stranded GFP-encoding RNA into plants and subsequently re-isolated GFP-specific siRNA from the tissues. The AISP of fifty-nine of these GFP-siRNA were determined, averaged, and subsequently plotted alongside the AISP profile obtained from the cyclophilin B/DBI/luciferase siRNA having >90% silencing properties (FIG. 6b). Comparison of the two groups show that profiles are nearly identical. This finding validates the information provided by the internal stability profiles and demonstrates that: (1) the profile identified by analysis of the cyclophilin B/DBI/luciferase siRNAs are not gene specific; and (2) AISP values can be used to search for strong siRNAs in a variety of species.

[0351] Both chemical modifications and base-pair mismatches can be incorporated into siRNA to alter the duplex's AISP and functionality. For instance, introduction of mismatches at positions 1 or 2 of the sense strand destabilized the 5′ end of the sense strand and increases the functionality of the molecule (see Luc, FIG. 7). Similarly, addition of 2′-O-methyl groups to positions 1 and 2 of the sense strand can also alter the AISP and (as a result) increase both the functionality of the molecule and eliminate off-target effects that results from sense strand homology with the unrelated targets (FIG. 8).

Rationale for Criteria in a Biological Context

[0352] The fate of siRNA in the RNAi pathway may be described in 5 major steps: (1) duplex recognition and pre-RISC complex formation; (2) ATP-dependent duplex unwinding/strand selection and RISC activation; (3) mRNA target identification; (4) mRNA cleavage, and (5) product release (FIG. 1). Given the level of nucleic acid-protein interactions at each step, siRNA functionality is likely influenced by specific biophysical and molecular properties that promote efficient interactions within the context of the multi-component complexes. Indeed, the systematic analysis of the siRNA test set identified multiple factors that correlate well with functionality. When combined into a single algorithm, they proved to be very effective in selecting active siRNAs.

[0353] The factors described here may also be predictive of key functional associations important for each step in RNAi. For example, the potential formation of internal hairpin structures correlated negatively with siRNA functionality. Complementary strands with stable internal repeats are more likely to exist as stable hairpins thus decreasing the effective concentration of the functional duplex form. This suggests that the duplex is the preferred conformation for initial pre-RISC association. Indeed, although single complementary strands can induce gene silencing, the effective concentration required is at least two orders of magnitude higher than that of the duplex form.

[0354] siRNA-pre-RISC complex formation is followed by an ATP-dependent duplex unwinding step and “activation” of the RISC. The siRNA functionality was shown to correlate with overall low internal stability of the duplex and low internal stability of the 3′ sense end (or differential internal stability of the 3′ sense compare to the 5′ sense strand), which may reflect strand selection and entry into the RISC. Overall duplex stability and low internal stability at the 3′ end of the sense strand were also correlated with siRNA functionality. Interestingly, siRNAs with very high and very low overall stability profiles correlate strongly with non-functional duplexes. One interpretation is that high internal stability prevents efficient unwinding while very low stability reduces siRNA target affinity and subsequent mRNA cleavage by the RISC.

[0355] Several criteria describe base preferences at specific positions of the sense strand and are even more intriguing when considering their potential mechanistic roles in target recognition and mRNA cleavage. Base preferences for A at position 19 of the sense strand but not C, are particularly interesting because they reflect the same base preferences observed for naturally occurring miRNA precursors. That is, among the reported miRNA precursor sequences 75% contain a U at position 1 which corresponds to an A in position 19 of the sense strand of siRNAs, while G was under-represented in this same position for miRNA precursors. These observations support the hypothesis that both miRNA precursors and siRNA duplexes are processed by very similar if not identical protein machinery. The functional interpretation of the predominance of a U/A base pair is that it promotes flexibility at the 5′ antisense ends of both siRNA duplexes and miRNA precursors and facilitates efficient unwinding and selective strand entrance into an activated RISC.

[0356] Among the criteria associated with base preferences that are likely to influence mRNA cleavage or possibly product release, the preference for U at position 10 of the sense strand exhibited the greatest impact, enhancing the probability of selecting an F80 sequence by 13.3%. Activated RISC preferentially cleaves target mRNA between nucleotides 10 and 11 relative to the 5′ end of the complementary targeting strand. Therefore, it may be that U, the preferred base for most endoribonucleases, at this position supports more efficient cleavage. Alternatively, a U/A bp between the targeting siRNA strand and its cognate target mRNA may create an optimal conformation for the RISC-associated “slicing” activity.

Post Algorithm Filters

[0357] According to another embodiment, the output of any one of the formulas previously listed can be filtered to remove or select for siRNAs containing undesirable or desirable motifs or properties, respectively. In one example, sequences identified by any of the formulas can be filtered to remove any and all sequences that induce toxicity or cellular stress. Introduction of an siRNA containing a toxic motif into a cell can induce cellular stress and/or cell death (apoptosis) which in turn can mislead researchers into associating a particular (e.g., nonessential) gene with, e.g., an essential function. Alternatively, sequences generated by any of the before mentioned formulas can be filtered to identify and retain duplexes that contain toxic motifs. Such duplexes may be valuable from a variety of perspectives including, for instance, uses as therapeutic molecules. A variety of toxic motifs exist and can exert their influence on the cell through RNAi and non-RNAi pathways. Examples of toxic motifs are explained more fully in commonly assigned U.S. Provisional Patent Application Ser. No. 60/538,874, entitled “Identification of Toxic Sequences,” filed Jan. 23, 2004. Briefly, toxic motifs include A/G UUU A/G/U, G/C AAA G/C, and GCCA, or a complement of any of the foregoing.

[0358] In another instance, sequences identified by any of the before mentioned formulas can be filtered to identify duplexes that contain motifs (or general properties) that provide serum stability or induce serum instability. In one envisioned application of siRNA as therapeutic molecules, duplexes targeting disease-associated genes will be introduced into patients intravenously. As the half-life of single and double stranded RNA in serum is short, post-algorithm filters designed to select molecules that contain motifs that enhance duplex stability in the presence of serum and/or (conversely) eliminate duplexes that contain motifs that destabilize siRNA in the presence of serum, would be beneficial.

[0359] In another instance, sequences identified by any of the before mentioned formulas can be filtered to identify duplexes that are hyperfunctional. Hyperfunctional sequences are defined as those sequences that (1) induce greater than 95% silencing of a specific target when they are transfected at subnanomolar concentrations (i.e., less than one nanomolar); and/or (2) induce functional (or better) levels of silencing for greater than 96 hours. Filters that identify hyperfunctional molecules can vary widely. In one example, the top ten, twenty, thirty, or forty siRNA can be assessed for the ability to silence a given target at, e.g., concentrations of 1 nM and 0.5nM to identify hyperfunctional molecules.

Poolinig

[0360] According to another embodiment, the present invention provides a pool of at least two siRNAs, preferably in the form of a kit or therapeutic reagent, wherein one strand of each of the siRNAs, the sense strand comprises a sequence that is substantially similar to a sequence within a target mRNA. The opposite strand, the antisense strand, will preferably comprise a sequence that is substantially complementary to that of the target mRNA. More preferably, one strand of each siRNA will comprise a sequence that is identical to a sequence that is contained in the target mRNA. Most preferably, each siRNA will be 19 base pairs in length, and one strand of each of the siRNAs will be 100% complementary to a portion of the target mRNA.

[0361] By increasing the number of siRNAs directed to a particular target using a pool or kit, one is able both to increase the likelihood that at least one siRNA with satisfactory functionality will be included, as well as to benefit from additive or synergistic effects. Further, when two or more siRNAs directed against a single gene do not have satisfactory levels of functionality alone, if combined, they may satisfactorily promote degradation of the target messenger RNA and successfully inhibit translation. By including multiple siRNAs in the system, not only is the probability of silencing increased, but the economics of operation are also improved when compared to adding different siRNAs sequentially. This effect is contrary to the conventional wisdom that the concurrent use of multiple siRNA will negatively impact gene silencing (e.g., Holen, T. et al. (2003) Similar behavior of single strand and double strand siRNAs suggests they act through a common RNAi pathway. NAR 31: 2401-21407).

[0362] In fact, when two siRNAs were pooled together, 54% of the pools of two siRNAs induced more than 95% gene silencing. Thus, a 2.5-fold increase in the percentage of functionality was achieved by randomly combining two siRNAs. Further, over 84% of pools containing two siRNAs induced more than 80% gene silencing.

[0363] More preferably, the kit is comprised of at least three siRNAs, wherein one strand of each siRNA comprises a sequence that is substantially similar to a sequence of the target mRNA and the other strand comprises a sequence that is substantially complementary to the region of the target mRNA. As with the kit that comprises at least two siRNAs, more preferably one strand will comprise a sequence that is identical to a sequence that is contained in the mRNA and another strand that is 100% complementary to a sequence that is contained in the mRNA. During experiments, when three siRNAs were combined together, 60% of the pools induced more than 95% gene silencing and 92% of the pools induced more than 80% gene silencing.

[0364] Further, even more preferably, the kit is comprised of at least four siRNAs, wherein one strand of each siRNA comprises a sequence that is substantially similar to a region of the sequence of the target mRNA, and the other strand comprises a sequence that is substantially complementary to the region of the target mRNA. As with the kit or pool that comprises at least two siRNAs, more preferably one strand of each of the siRNA duplexes will comprise a sequence that is identical to a sequence that is contained in the mRNA, and another strand that is 100% complementary to a sequence that is contained in the mRNA.

[0365] Additionally, kits and pools with at least five, at least six, and at least seven siRNAs may also be useful with the present invention. For example, pools of five siRNA induced 95% gene silencing with 77% probability and 80% silencing with 98.8% probability. Thus, pooling of siRNAs together can result in the creation of a target-specific silencing reagent with almost a 99% probability of being functional. The fact that such high levels of success are achievable using such pools of siRNA, enables one to dispense with costly and time-consuming target-specific validation procedures.

[0366] For this embodiment, as well as the other aforementioned embodiments, each of the siRNAs within a pool will preferably comprise 18-30 base pairs, more preferably 18-25 base pairs, and most preferably 19 base pairs. Within each siRNA, preferably at least 18 contiguous bases of the antisense strand will be 100% complementary to the target mRNA. More preferably, at least 19 contiguous bases of the antisense strand will be 100% complementary to the target mRNA. Additionally, there may be overhangs on either the sense strand or the antisense strand, and these overhangs may be at either the 5′ end or the 3′ end of either of the strands, for example there may be one or more overhangs of 1-6 bases. When overhangs are present, they are not included in the calculation of the number of base pairs. The two nucleotide 3′ overhangs mimic natural siRNAs and are commonly used but are not essential. Preferably, the overhangs should consist of two nucleotides, most often dTdT or UU at the 3′ end of the sense and antisense strand that are not complementary to the target sequence. The siRNAs may be produced by any method that is now known or that comes to be known for synthesizing double stranded RNA that one skilled in the art would appreciate would be useful in the present invention. Preferably, the siRNAs will be produced by Dharmacon's proprietary ACE® technology. However, other methods for synthesizing siRNAs are well known to persons skilled in the art and include, but are not limited to, any chemical synthesis of RNA oligonucleotides, ligation of shorter oligonucleotides, in vitro transcription of RNA oligonucleotides, the use of vectors for expression within cells, recombinant Dicer products and PCR products.

[0367] The siRNA duplexes within the aforementioned pools of siRNAs may correspond to overlapping sequences within a particular mRNA, or non-overlapping sequences of the mRNA. However, preferably they correspond to non-overlapping sequences. Further, each siRNA may be selected randomly, or one or more of the siRNA may be selected according to the criteria discussed above for maximizing the effectiveness of siRNA.

[0368] Included in the definition of siRNAs are siRNAs that contain substituted and/or labeled nucleotides that may, for example, be labeled by radioactivity, fluorescence or mass. The most common substitutions are at the 2′ position of the ribose sugar, where moieties such as H (hydrogen) F, NH₃, OCH₃ and other O— alkyl, alkenyl, alkynyl, and orthoesters, may be substituted, or in the phosphorous backbone, where sulfur, amines or hydrocarbons may be substituted for the bridging of non-bridging atoms in the phosphodiester bond. Examples of modified siRNAs are explained more fully in commonly assigned U.S. patent application Ser. No. 10/613,077, filed Jul. 1, 2003.

[0369] Additionally, as noted above, the cell type into which the siRNA is introduced may affect the ability of the siRNA to enter the cell; however, it does not appear to affect the ability of the siRNA to function once it enters the cell. Methods for introducing double-stranded RNA into various cell types are well known to persons skilled in the art.

[0370] As persons skilled in the art are aware, in certain species, the presence of proteins such as RdRP, the RNA-dependent RNA polymerase, may catalytically enhance the activity of the siRNA. For example, RdRP propagates the RNAi effect in C. elegans and other non-mammalian organisms. In fact, in organisms that contain these proteins, the siRNA may be inherited. Two other proteins that are well studied and known to be a part of the machinery are members of the Argonaute family and Dicer, as well as their homologues. There is also initial evidence that the RISC complex might be associated with the ribosome so the more efficiently translated mRNAs will be more susceptible to silencing than others.

[0371] Another very important factor in the efficacy of siRNA is mRNA localization. In general, only cytoplasmic mRNAs are considered to be accessible to RNAi to any appreciable degree. However, appropriately designed siRNAs, for example, siRNAs modified with internucleotide linkages or 2′-O-methyl groups, may be able to cause silencing by acting in the nucleus. Examples of these types of modifications are described in commonly assigned U.S. patent application Ser. Nos. 10/431,027 and 10/613,077.

[0372] As described above, even when one selects at least two siRNAs at random, the effectiveness of the two may be greater than one would predict based on the effectiveness of two individual siRNAs. This additive or synergistic effect is particularly noticeable as one increases to at least three siRNAs, and even more noticeable as one moves to at least four siRNAs. Surprisingly, the pooling of the non-functional and semi-functional siRNAs, particularly more than five siRNAs, can lead to a silencing mixture that is as effective if not more effective than any one particular functional siRNA.

[0373] Within the kits of the present invention, preferably each siRNA will be present in a concentration of between 0.001 and 200 μM, more preferably between 0.01 and 200 nM, and most preferably between 0.1 and 10 nM.

[0374] In addition to preferably comprising at least four or five siRNAs, the kits of the present invention will also preferably comprise a buffer to keep the siRNA duplex stable. Persons skilled in the art are aware of buffers suitable for keeping siRNA stable. For example, the buffer may be comprised of 100 mM KCl, 30 mM HEPES-pH 7.5, and 1 mM MgCl₂. Alternatively, kits might contain complementary strands that contain any one of a number of chemical modifications (e.g., a 2′-O-ACE) that protect the agents from degradation by nucleases. In this instance, the user may (or may not) remove the modifying protective group (e.g., deprotect) before annealing the two complementary strands together.

[0375] By way of example, the kits may be organized such that pools of siRNA duplexes are provided on an array or microarray of wells or drops for a particular gene set or for unrelated genes. The array may, for example, be in 96 wells, 384 wells or 1284 wells arrayed in a plastic plate or on a glass slide using techniques now known or that come to be known to persons skilled in the art. Within an array, preferably there will be controls such as functional anti-lamin A/C, cyclophilin and two siRNA duplexes that are not specific to the gene of interest.

[0376] In order to ensure stability of the siRNA pools prior to usage, they may be retained in lyophilized form at minus twenty degrees (−20° C.) until they are ready for use. Prior to usage, they should be resuspended; however, even once resuspended, for example, in the aforementioned buffer, they should be kept at minus twenty degrees, (−20° C.) until used. The aforementioned buffer, prior to use, may be stored at approximately 4° C. or room temperature. Effective temperatures at which to conduct transfections are well known to persons skilled in the art and include for example, room temperature.

[0377] The kits may be applied either in vivo or in vitro. Preferably, the siRNA of the pools or kits is applied to a cell through transfection, employing standard transfection protocols. These methods are well known to persons skilled in the art and include the use of lipid-based carriers, electroporation, cationic carriers, and microinjection. Further, one could apply the present invention by synthesizing equivalent DNA sequences (either as two separate, complementary strands, or as hairpin molecules) instead of siRNA sequences and introducing them into cells through vectors. Once in the cells, the cloned DNA could be transcribed, thereby forcing the cells to generate the siRNA. Examples of vectors suitable for use with the present application include but are not limited to the standard transient expression vectors, adenoviruses, retroviruses, lentivirus-based vectors, as well as other traditional expression vectors. Any vector that has an adequate siRNA expression and procession module may be used. Furthermore, certain chemical modifications to siRNAs, including but not limited to conjugations to other molecules, may be used to facilitate delivery. For certain applications it may be preferable to deliver molecules without transfection by simply formulating in a physiological acceptable solution.

[0378] This embodiment may be used in connection with any of the aforementioned embodiments. Accordingly, the sequences within any pool may be selected by rational design.

Multigene Silencing

[0379] In addition to developing kits that contain multiple siRNA directed against a single gene, another embodiment includes the use of multiple siRNA targeting multiple genes. Multiple genes may be targeted through the use of high- or hyper-functional siRNA. High- or hyper-functional siRNA that exhibit increased potency, require lower concentrations to induce desired phenotypic (and thus therapeutic) effects. This circumvents RISC saturation. It therefore reasons that if lower concentrations of a single siRNA are needed for knockout or knockdown expression of one gene, then the remaining (uncomplexed) RISC will be free and available to interact with siRNA directed against two, three, four, or more, genes. Thus in this embodiment, the authors describe the use of highly functional or hyper-functional siRNA to knock out three separate genes. More preferably, such reagents could be combined to knockout four distinct genes. Even more preferably, highly functional or hyperfunctional siRNA could be used to knock out five distinct genes. Most preferably, siRNA of this type could be used to knockout or knockdown the expression of six or more genes.

Hyperfunctional siRNA

[0380] The term hyperfunctional siRNA (hf-siRNA) describes a subset of the siRNA population that induces RNAi in cells at low- or sub-nanomolar concentrations for extended periods of time. These traits, heightened potency and extended longevity of the RNAi phenotype, are highly attractive from a therapeutic standpoint. Agents having higher potency require lesser amounts of the molecule to achieve the desired physiological response, thus reducing the probability of side effects due to “off-target” interference. In addition to the potential therapeutic benefits associated with hyperfunctional siRNA, hf-siRNA are also desirable from an economic perspective. Hyperfunctional siRNA may cost less on a per-treatment basis, thus reducing overall expenditures to both the manufacturer and the consumer.

[0381] Identification of hyperfunctional siRNA involves multiple steps that are designed to examine an individual siRNA agent's concentration- and/or longevity-profiles. In one non-limiting example, a population of siRNA directed against a single gene are first analyzed using the previously described algorithm (Formula VIII). Individual siRNA are then introduced into a test cell line and assessed for the ability to degrade the target mRNA. It is important to note that when performing this step it is not necessary to test all of the siRNA. Instead, it is sufficient to test only those siRNA having the highest SMARTSCORES™, or siRNA ranking (i.e., SMARTSCORES™, or siRNA ranking >−10). Subsequently, the gene silencing data is plotted against the SMARTSCORES™, or siRNA rankings (see FIG. 9). siRNA that (1) induce a high degree of gene silencing (i.e., they induce greater than 80% gene knockdown) and (2) have superior SMARTSCORES™ (i.e., a SMARTSCORE™-™, or siRNA ranking, of >−10, suggesting a desirable average internal stability profile) are selected for further investigations designed to better understand the molecule's potency and longevity. In one, non-limitinig study dedicated to understanding a molecule's potency, an siRNA is introduced into one (or more) cell types in increasingly diminishing concentrations (e.g., 3.0→0.3 nM). Subsequently, the level of gene silencing induced by each concentration is examined and siRNA that exhibit hyperfunctional potency (i.e., those that induce 80% silencing or greater at, e.g., picomolar concentrations) are identified. In a second study, the longevity profiles of siRNA having high (>−10) SMARTSCORES™, or siRNA rankings and greater than 80% silencing are examined. In one non-limiting example of how this is achieved, siRNA are introduced into a test cell line and the levels of RNAi are measured over an extended period of time (e.g., 24-168 hrs). siRNAs that exhibit strong RNA interference patterns (i.e., >80% interference) for periods of time greater than, e.g., 120 hours, are thus identified. Studies similar to those described above can be performed on any and all of the >10⁶ siRNA included in this document to further define the most functional molecule for any given gene. Molecules possessing one or both properties (extended longevity and heightened potency) are labeled “hyperfunctional siRNA,” and earmarked as candidates for future therapeutic studies.

[0382] While the example(s) given above describe one means by which hyperfunctional siRNA can be isolated, neither the assays themselves nor the selection parameters used are rigid and can vary with each family of siRNA. Families of siRNA include siRNAs directed against a single gene, or directed against a related family of genes.

[0383] The highest quality siRNA achievable for any given gene may vary considerably. Thus, for example, in the case of one gene (gene X), rigorous studies such as those described above may enable the identification of an siRNA that, at picomolar concentrations, induces 99⁺% silencing for a period of 10 days. Yet identical studies of a second gene (gene Y) may yield an siRNA that at high nanomolar concentrations (e.g., 100 nM) induces only 75% silencing for a period of 2 days. Both molecules represent the very optimum siRNA for their respective gene targets and therefore are designated “hyperfunctional.” Yet due to a variety of factors including but not limited to target concentration, siRNA stability, cell type, off-target interference, and others, equivalent levels of potency and longevity are not achievable. Thus, for these reasons, the parameters described in the before mentioned assays can vary. While the initial screen selected siRNA that had SMARTSCORES™ above −10 and a gene silencing capability of greater than 80%, selections that have stronger (or weaker) parameters can be implemented. Similarly, in the subsequent studies designed to identify molecules with high potency and longevity, the desired cutoff criteria (i.e., the lowest concentration that induces a desirable level of interference, or the longest period of time that interference can be observed) can vary. The experimentation subsequent to application of the rational criteria of this application is significantly reduced where one is trying to obtain a suitable hyperfunctional siRNA for, for example, therapeutic use. When, for example, the additional experimentation of the type described herein is applied by one skilled in the art with this disclosure in hand, a hyperfunctional siRNA is readily identified.

[0384] The siRNA may be introduced into a cell by any method that is now known or that comes to be known and that from reading this disclosure, persons skilled in the art would determine would be useful in connection with the present invention in enabling siRNA to cross the cellular membrane. These methods include, but are not limited to, any manner of transfection, such as, for example, transfection employing DEAE-Dextran, calcium phosphate, cationic lipids/liposomes, micelles, manipulation of pressure, microinjection, electroporation, immunoporation, use of vectors such as viruses, plasmids, cosmids, bacteriophages, cell fusions, and coupling of the polynucleotides to specific conjugates or ligands such as antibodies, antigens, or receptors, passive introduction, adding moieties to the siRNA that facilitate its uptake, and the like.

[0385] Having described the invention with a degree of particularity, examples will now be provided. These examples are not intended to and should not be construed to limit the scope of the claims in any way.

### EXAMPLES

### General Techniques and Nomenclatures

[0386] siRNA nomenclature. All siRNA duplexes are referred to by sense strand. The first nucleotide of the 5′-end of the sense strand is position 1, which corresponds to position 19 of the antisense strand for a 19-mer. In most cases, to compare results from different experiments, silencing was determined by measuring specific transcript mRNA levels or enzymatic activity associated with specific transcript levels, 24 hours post-transfection, with siRNA concentrations held constant at 100 nM. For all experiments, unless otherwise specified, transfection efficiency was ensured to be over 95%, and no detectable cellular toxicity was observed. The following system of nomenclature was used to compare and report siRNA-silencing functionality: “F” followed by the degree of minimal knockdown. For example, F50 signifies at least 50% knockdown, F80 means at least 80%, and so forth. For this study, all sub-F50 siRNAs were considered nonfunctional.

[0387] Cell culture and transfection. 96-well plates are coated with 50 μl of 50 mg/ml poly-L-lysine (Sigma) for 1 hr, and then washed 3× with distilled water before being dried for 20 min. HEK293 cells or HEK293Lucs or any other cell type of interest are released from their solid support by trypsinization, diluted to 3.5×10⁵ cells/ml, followed by the addition of 100 μL of cells/well. Plates are then incubated overnight at 37° C., 5% CO₂. Transfection procedures can vary widely depending on the cell type and transfection reagents. In one non-limiting example, a transfection mixture consisting of 2 mL Opti-MEM I (Gibco-BRL), 80 μl Lipofectamine 2000 (Invitrogen), 15 μL SUPERNasin at 20 U/μl (Ambion), and 1.5 μl of reporter gene plasmid at 1 μg/μl is prepared in 5-ml polystyrene round bottom tubes. One hundred μl of transfection reagent is then combined with 100 μl of siRNAs in polystyrene deep-well titer plates (Beckman) and incubated for 20 to 30 min at room temperature. Five hundred and fifty microliters of Opti-MEM is then added to each well to bring the final siRNA concentration to 100 nM. Plates are then sealed with parafilm and mixed. Media is removed from HEK293 cells and replaced with 95 μl of transfection mixture. Cells are incubated overnight at 37° C., 5% CO₂.

[0388] Quantification of gene knockdown. A variety of quantification procedures can be used to measure the level of silencing induced by siRNA or siRNA pools. In one non-limiting example: to measure mRNA levels 24 hrs post-transfection, QuantiGene branched-DNA (bDNA) kits (Bayer) (Wang, et al, Regulation of insulin preRNA splicing by glucose. Proc. Natl. Acad. Sci. USA 1997, 94:4360.) are used according to manufacturer instructions. To measure luciferase activity, media is removed from HIEK293 cells 24 hrs post-transfection, and 50 μl of Steady-GLO reagent (Promega) is added. After 5 minutes, plates are analyzed on a plate reader.

### Example I

### Sequences Used to Develop the Algorithm

[0389] Anti-Firefly and anti-Cyclophilin siRNAs panels (FIG. 5a, b) sorted according to using Formula VIII predicted values. All siRNAs scoring more than 0 (formula VIII) and more then 20 (formula IX) are fully functional. All ninety sequences for each gene (and DBI) appear below in Table III.

TABLE III

| | | | |
|---|---|---|---|
| Cyclo | 1 | SEQ. ID 0032 | GUUCCAAAAACAGUGGAUA |
| Cyclo | 2 | SEQ. ID 0033 | UCCAAAAACAGUGGAUAAU |
| Cyclo | 3 | SEQ. ID 0034 | CAAAAACAGUGGAUAAUUU |
| Cyclo | 4 | SEQ. ID 0035 | AAAACAGUGGAUAAUUUUG |
| Cyclo | 5 | SEQ. ID 0036 | AACAGUGGAUAAUUUUGUG |
| Cyclo | 6 | SEQ. ID 0037 | CAGUGGAUAAUUUUGUGGC |
| Cyclo | 7 | SEQ. ID 0038 | GUGGAUAAUUUUGUGGCCU |
| Cyclo | 8 | SEQ. ID 0039 | GGAUAAUUUUGUGGCCUUA |
| Cyclo | 9 | SEQ. ID 0040 | AUAAUUUUGUGGCCUUAGC |
| Cyclo | 10 | SEQ. ID 0041 | AAUUUUGUGGCCUUAGCUA |
| Cyclo | 11 | SEQ. ID 0042 | UUUUGUGGCCUUAGCUACA |
| Cyclo | 12 | SEQ. ID 0043 | UUGUGGCCUUAGCUACAGG |
| Cyclo | 13 | SEQ. ID 0044 | GUGGCCUUAGCUACAGGAG |
| Cyclo | 14 | SEQ. ID 0045 | GGCCUUAGCUACAGGAGAG |
| Cyclo | 15 | SEQ. ID 0046 | CCUUAGCUACAGGAGAGAA |
| Cyclo | 16 | SEQ. ID 0047 | UUAGCUACAGGAGAGAAAG |
| Cyclo | 17 | SEQ. ID 0048 | AGCUACAGGACAGAAAGGA |
| Cyclo | 18 | SEQ. ID 0049 | CUACAGGAGAGAAAGGAUU |
| Cyclo | 19 | SEQ. ID 0050 | ACAGGAGAGAAAGGAUUUG |
| Cyclo | 20 | SEQ. ID 0051 | AGGAGAGAAAGGAUUUGGC |
| Cyclo | 21 | SEQ. ID 0052 | GAGAGAAAGGAUUUGGCUA |
| Cyclo | 22 | SEQ. ID 0053 | GAGAAAGGAUUUGGCUACA |
| Cyclo | 23 | SEQ. ID 0054 | GAAAGGAUUUGGCUACAAA |
| Cyclo | 24 | SEQ. ID 0055 | AAGGAUUUGGCUACAAAAA |
| Cyclo | 25 | SEQ. ID 0056 | GGAUUUGGCUACAAAAACA |
| Cyclo | 26 | SEQ. ID 0057 | AUUUGGCUACAAAAACAGC |
| Cyclo | 27 | SEQ. ID 0058 | UUGGCUACAAAAACAGCAA |
| Cyclo | 28 | SEQ. ID 0059 | GGCUACAAAAACAGCAAAU |
| Cyclo | 29 | SEQ. ID 0060 | CUACAAAAACAGCAAAUUC |
| Cyclo | 30 | SEQ. ID 0061 | ACAAAAACAGCAAAUUCCA |
| Cyclo | 31 | SEQ. ID 0062 | AAAAACAGCAAAUUCCAUC |
| Cyclo | 32 | SEQ. ID 0063 | AAACAGCAAAUUCCAUCGU |
| Cyclo | 33 | SEQ. ID 0064 | ACAGCAAAUUCCAUCGUGU |
| Cyclo | 34 | SEQ. ID 0065 | AGCAAAUUCCAUCGUGUAA |
| Cyclo | 35 | SEQ. ID 0066 | CAAAUUCCAUCGUGUAAUC |
| Cyclo | 36 | SEQ. ID 0067 | AAUUCCAUCGUGUAAUCAA |
| Cyclo | 37 | SEQ. ID 0068 | UUCCAUCGUGUAAUCAAGG |
| Cyclo | 38 | SEQ. ID 0069 | CCAUCGUGUAAUCAAGGAC |
| Cyclo | 39 | SEQ. ID 0070 | AUCGUGUAAUCAAGGACUU |
| Cyclo | 40 | SEQ. ID 0071 | CGUGUAAUCAAGGACUUCA |
| Cyclo | 41 | SEQ. ID 0072 | UGUAAUCAAGGACUUCAUG |
| Cyclo | 42 | SEQ. ID 0073 | UAAUCAAGGACUUCAUGAU |
| Cyclo | 43 | SEQ. ID 0074 | AUCAAGGACUUCAUGAUCC |
| Cyclo | 44 | SEQ. ID 0075 | CAAGGACUUCAUGAUCCAG |
| Cyclo | 45 | SEQ. ID 0076 | AGGACUUCAUGAUCCAGGG |
| Cyclo | 46 | SEQ. ID 0077 | GACUUCAUGAUCCAGGGCG |
| Cyclo | 47 | SEQ. ID 0078 | CUUCAUGAUCCAGGGCGGA |
| Cyclo | 48 | SEQ. ID 0079 | UCAUGAUCCAGGGCGGAGA |
| Cyclo | 49 | SEQ. ID 0080 | AUGAUCCAGGGCGGAGACU |
| Cyclo | 50 | SEQ. ID 0081 | GAUCCAGGGCGGAGACUUC |
| Cyclo | 51 | SEQ. ID 0082 | UCCAGGGCGGAGACUUCAC |
| Cyclo | 52 | SEQ. ID 0083 | CAGGGCGGAGACUUCACCA |
| Cyclo | 53 | SEQ. ID 0084 | GGGCGGAGACUUCACCAGG |
| Cyclo | 54 | SEQ. ID 0085 | GCGGAGACUUCACCAGGGG |
| Cyclo | 55 | SEQ. ID 0086 | GGAGACUUCACCAGGGGAG |
| Cyclo | 56 | SEQ. ID 0087 | AGACUUCACCAGGGGAGAU |
| Cyclo | 57 | SEQ. ID 0088 | ACUUCACCAGGGGAGAUGG |
| Cyclo | 58 | SEQ. ID 0089 | UUCACCAGGGGAGAUGGCA |
| Cyclo | 59 | SEQ. ID 0090 | CACCAGGGGAGAUGGCACA |
| Cyclo | 60 | SEQ. ID 0091 | CCACGGGAGAUGGCACAGG |
| Cyclo | 61 | SEQ. ID 0092 | AGGGGAGAUGGCACAGGAG |
| Cyclo | 62 | SEQ. ID 0093 | GGGAGAUGGCACAGGAGGA |
| Cyclo | 63 | SEQ. ID 0094 | GAGAUGGCACAGGAGGAAA |
| Cyclo | 64 | SEQ. ID 0095 | CAUGGCACAGGAGGAAAGA |
| Cyclo | 65 | SEQ. ID 0096 | UGGCACAGGAGGAAAGAGC |
| Cyclo | 66 | SEQ. ID 0097 | GCACAGGAGGAAAGAGCAU |
| Cyclo | 67 | SEQ. ID 0098 | ACAGGAGGAAAGAGCAUCU |
| Cyclo | 68 | SEQ. ID 0099 | AGGAGGAAAGAGCAUCUAC |
| Cyclo | 69 | SEQ. ID 0100 | GAGGAAAGAGCAUCUACGG |
| Cyclo | 70 | SEQ. ID 0101 | GGAAAGAGCAUCUACGGUG |
| Cyclo | 71 | SEQ. ID 0102 | AAAGAGCAUCUACGGUGAG |
| Cyclo | 72 | SEQ. ID 0103 | AGAGCAUCUACGGUGAGCG |
| Cyclo | 73 | SEQ. ID 0104 | AGCAUCUACGGUGAGCGCU |
| Cyclo | 74 | SEQ. ID 0105 | CAUCUACGGUGAGCGCUUC |
| Cyclo | 75 | SEQ. ID 0106 | UCUACGGUGAGCGCUUCCC |
| Cyclo | 76 | SEQ. ID 0107 | UACGGUGAGCGCUUCCCCG |
| Cyclo | 77 | SEQ. ID 0108 | CGGUGAGCGCUUCCCCGAU |
| Cyclo | 78 | SEQ. ID 0109 | GUGAGCGCUUCCCCGAUGA |
| Cyclo | 79 | SEQ. ID 0110 | GAGCGCUUCCCCGAUGAGA |
| Cyclo | 80 | SEQ. ID 0111 | GCGCUUCCCCGAUGAGAAC |
| Cyclo | 81 | SEQ. ID 0112 | GCUUCCCCGAUGAGAACUU |
| Cyclo | 82 | SEQ. ID 0113 | UUCCCCGAUGAGAACUUCA |
| Cyclo | 83 | SEQ. ID 0114 | CCCCGAUGAGAACUUCAAA |
| Cyclo | 84 | SEQ. ID 0115 | CCGAUGAGAACUUCAAACU |
| Cyclo | 85 | SEQ. ID 0116 | GAUGAGAACUUCAAACUGA |
| Cyclo | 86 | SEQ. ID 0117 | UGAGAACUUCAAACUGAAG |
| Cyclo | 87 | SEQ. ID 0118 | AGAACUUCAAACUGAAGCA |
| Cyclo | 88 | SEQ. ID 0119 | AACUUCAAACUGAAGCACU |
| Cyclo | 89 | SEQ. ID 0120 | CUUCAAACUGAAGCACUAC |
| Cyclo | 90 | SEQ. ID 0121 | UCAAACUGAAGCACUACGG |
| DB | 1 | SEQ. ID 0122 | ACGGGCAAGGCCAAGUGGG |
| DB | 2 | SEQ. ID 0123 | CGGGCAAGGCCAAGUGGGA |
| DB | 3 | SEQ. ID 0124 | GGGCAAGGCCAAGUGGGAU |
| DB | 4 | SEQ. ID 0125 | GGCAAGGCCAAGUGGGAUG |
| DB | 5 | SEQ. ID 0126 | GCAAGGCCAAGUGGGAUGC |
| DB | 6 | SEQ. ID 0127 | CAAGGCCAAGUGGGAUGCC |
| DB | 7 | SEQ. ID 0128 | AAGGCCAAGUGGGAUGCCU |
| DB | 8 | SEQ. ID 0129 | AGGCCAAGUGGGAUGCCUG |
| DB | 9 | SEQ. ID 0130 | GGCCAAGUGGGAUGCCUGG |
| DB | 10 | SEQ. ID 0131 | GCCAAGUGGGAUGCCUGGA |
| DB | 11 | SEQ. ID 0132 | CCAAGUGGGAUGCCUGGAA |
| DB | 12 | SEQ. ID 0133 | CAAGUGGGAUGCCUGGAAU |
| DB | 13 | SEQ. ID 0134 | AAGUGGGAUGCCUGGAAUG |
| DB | 14 | SEQ. ID 0135 | AGUGGGAUGCCUGGAAUGA |
| DB | 15 | SEQ. ID 0136 | GUGGGAUGCCUGGAAUGAG |
| DB | 16 | SEQ. ID 0137 | UGGGAUGCCUGGAAUGAGC |
| DB | 17 | SEQ. ID 0138 | GGGAUGCCUGGAAUGAGCU |
| DB | 18 | SEQ. ID 0139 | GGAUGCCUGGAAUGAGCUG |
| DB | 19 | SEQ. ID 0140 | GAUGCCUGGAAUGAGCUGA |
| DB | 20 | SEQ. ID 0141 | AUGCCUGGAAUGAGCUGAA |
| DB | 21 | SEQ. ID 0142 | UGCCUGGAAUGAGCUGAAA |
| DB | 22 | SEQ. ID 0143 | GCCUGGAAUGAGCUGAAAG |
| DB | 23 | SEQ. ID 0144 | CCUGGAAUGAGCUGAAAGG |
| DB | 24 | SEQ. ID 0145 | CUGGAAUGAGCUGAAAGGG |
| DB | 25 | SEQ. ID 0146 | UGGAAUGAGCUGAAAGGGA |
| DB | 26 | SEQ. ID 0147 | GGAAUGAGCUGAAAGGGAC |
| DB | 27 | SEQ. ID 0148 | GAAUGAGCUGAAAGGGACU |
| DB | 28 | SEQ. ID 0149 | AAUGAGCUGAAAGGGACUU |
| DB | 29 | SEQ. ID 0150 | AUGAGCUGAAAGGGACUUC |
| DB | 30 | SEQ. ID 0151 | UGAGCUGAAAGGGACUUCC |
| DB | 31 | SEQ. ID 0152 | GAGCUGAAAGGGACUUCCA |
| DB | 32 | SEQ. ID 0153 | AGCUGAAAGGGACUUCCAA |
| DB | 33 | SEQ. ID 0154 | GCUGAAAGGGACUUCCAAG |
| DB | 34 | SEQ. ID 0155 | CUGAAAGGGACUUCCAAGG |
| DB | 35 | SEQ. ID 0156 | UGAAAGGGACUUCCAAGGA |
| DB | 36 | SEQ. ID 0157 | GAAAGGGACUUCCAAGGAA |
| DB | 37 | SEQ. ID 0158 | AAAGGGACUUCCAAGGAAG |
| DB | 38 | SEQ. ID 0159 | AAGGGACUUCCAAGGAAGA |
| DB | 39 | SEQ. ID 0160 | AGGGACUUCCAAGGAAGAU |
| DB | 40 | SEQ. ID 0161 | GGGACUUCCAAGGAAGAUG |
| DB | 41 | SEQ. ID 0162 | GGACUUCCAAGGAAGAUGC |
| DB | 42 | SEQ. ID 0163 | GACUUCCAAGGAAGAUGCC |
| DB | 43 | SEQ. ID 0164 | ACUUCCAAGGAAGAUGCCA |
| DB | 44 | SEQ. ID 0165 | CUUCCAAGGAAGAUGCCAU |
| DB | 45 | SEQ. ID 0166 | UUCCAAGGAAGAUGCCAUG |
| DB | 46 | SEQ. ID 0167 | UCCAAGGAAGAUGCCAUGA |
| DB | 47 | SEQ. ID 0168 | CCAAGGAAGAUGCCAUGAA |
| DB | 48 | SEQ. ID 0169 | CAAGGAAGAUGCCAUGAAA |
| DB | 49 | SEQ. ID 0170 | AAGGAAGAUGCCAUGAAAG |
| DB | 50 | SEQ. ID 0171 | AGGAAGAUGCCAUGAAAGC |
| DB | 51 | SEQ. ID 0172 | GGAAGAUGCCAUGAAAGCU |
| DB | 52 | SEQ. ID 0173 | GAAGAUGCCAUGAAAGCUU |
| DB | 53 | SEQ. ID 0174 | AAGAUGCCAUGAAAGCUUA |
| DB | 54 | SEQ. ID 0175 | AGAUGCCAUGAAAGCUUAC |
| DB | 55 | SEQ. ID 0176 | GAUGCCAUGAAAGCUUACA |
| DB | 56 | SEQ. ID 0177 | AUGCCAUGAAAGCUUACAU |
| DB | 57 | SEQ. ID 0178 | UGCCAUGAAAGCUUACAUC |
| DB | 58 | SEQ. ID 0179 | GCCAUGAAAGCUUACAUCA |
| DB | 59 | SEQ. ID 0180 | CCAUGAAAGCUUACAUCAA |
| DB | 60 | SEQ. ID 0181 | CAUGAAAGCUUACAUCAAC |
| DB | 61 | SEQ. ID 0182 | AUGAAAGCUUACAUCAACA |
| DB | 62 | SEQ. ID 0183 | UGAAAGCUUACAUCAACAA |
| DB | 63 | SEQ. ID 0184 | GAAAGCUUACAUCAACAAA |
| DB | 64 | SEQ. ID 0185 | AAAGCUUACAUCAACAAAG |
| DB | 65 | SEQ. ID 0186 | AAGCUUACAUCAACAAAGU |
| DB | 66 | SEQ. ID 0187 | AGCUUACAUCAACAAAGUA |
| DB | 67 | SEQ. ID 0188 | GCUUACAUCAACAAAGUAG |
| DB | 68 | SEQ. ID 0189 | CUUACAUCAACAAAGUAGA |
| DB | 69 | SEQ. ID 0190 | UUACAUCAACAAAGUAGAA |
| DB | 70 | SEQ. ID 0191 | UACAUCAACAAAGUAGAAG |
| DB | 71 | SEQ. ID 0192 | ACAUCAACAAAGUAGAAGA |
| DB | 72 | SEQ. ID 0193 | CAUCAACAAAGUAGAAGAG |
| DB | 73 | SEQ. ID 0194 | AUCAACAAAGUAGAAGAGC |
| DB | 74 | SEQ. ID 0195 | UCAACAAAGUAGAAGAGCU |
| DB | 75 | SEQ. ID 0196 | CAACAAAGUAGAAGAGCUA |
| DB | 76 | SEQ. ID 0197 | AACAAAGUAGAAGAGCUAA |
| DB | 77 | SEQ. ID 0198 | ACAAAGUAGAAGAGCUAAA |
| DB | 78 | SEQ. ID 0199 | CAAAGUAGAAGAGCUAAAG |
| DB | 79 | SEQ. ID 0200 | AAAGUAGAAGAGCUAAAGA |
| DB | 80 | SEQ. ID 0201 | AAGUAGAAGAGCUAAAGAA |
| DB | 81 | SEQ. ID 0202 | AGUAGAAGAGCUAAAGAAA |
| DB | 82 | SEQ. ID 0203 | GUAGAAGAGCUAAAGAAAA |
| DB | 83 | SEQ. ID 0204 | UAGAAGAGCUAAAGAAAAA |
| DB | 84 | SEQ. ID 0205 | AGAAGAGCUAAAGAAAAAA |
| DB | 85 | SEQ. ID 0206 | GAAGAGCUAAAGAAAAAAU |
| DB | 86 | SEQ. ID 0207 | AAGAGCUAAAGAAAAAAUA |
| DB | 87 | SEQ. ID 0208 | AGAGCUAAAGAAAAAAUAC |
| DB | 88 | SEQ. ID.0209 | GAGCUAAAGAAAAAAUACG |
| DB | 89 | SEQ. ID 0210 | AGCUAAAGAAAAAAUACGG |
| DB | 90 | SEQ. ID 0211 | GCUAAAGAAAAAAUACGGG |
| Luc | 1 | SEQ. ID 0212 | AUCCUCAUAAAGGCCAAGA |
| Luc | 2 | SEQ. ID 0213 | AGAUCCUCAUAAAGGCCAA |
| Luc | 3 | SEQ. ID 0214 | AGAGAUCCUCAUAAAGGCC |
| Luc | 4 | SEQ. ID 0215 | AGAGAGAUCCUCAUAAAGG |
| Luc | 5 | SEQ. ID 0216 | UCAGAGAGAUCCUCAUAAA |
| Luc | 6 | SEQ. ID 0217 | AAUCAGAGAGAUCCUCAUA |
| Luc | 7 | SEQ. ID 0218 | AAAAUCAGAGAGAUCCUCA |
| Luc | 8 | SEQ. ID 0219 | GAAAAAUCAGAGAGAUCCU |
| Luc | 9 | SEQ. ID 0220 | AAGAAAAAUCAGAGAGAUC |
| Luc | 10 | SEQ. ID 0221 | GCAAGAAAAAUCAGAGAGA |
| Luc | 11 | SEQ. ID 0222 | ACGCAAGAAAAAUCAGAGA |
| Luc | 12 | SEQ. ID 0223 | CGACGCAAGAAAAAUCAGA |
| Luc | 13 | SEQ. ID 0224 | CUCGACGCAAGAAAAAUCA |
| Luc | 14 | SEQ. ID 0225 | AACUCGACGCAAGAAAAAU |
| Luc | 15 | SEQ. ID 0226 | AAAACUCGACGCAAGAAAA |
| Luc | 16 | SEQ. ID 0227 | GGAAAACUCGACGCAAGAA |
| Luc | 17 | SEQ. ID 0228 | CCGGAAAACUCGACGCAAG |
| Luc | 18 | SEQ. ID 0229 | UACCGGAAAACUCGACGCA |
| Luc | 19 | SEQ. ID 0230 | CUUACCGGAAAACUCGACG |
| Luc | 20 | SEQ. ID 0231 | GUCUUACCGGAAAACUCGA |
| Luc | 21 | SEQ. ID 0232 | AGGUCUUACCGGAAAACUC |
| Luc | 22 | SEQ. ID 0233 | AAAGGUCUUACCGGAAAAC |
| Luc | 23 | SEQ. ID 0234 | CGAAAGGUCUUACCGGAAA |
| Luc | 24 | SEQ. ID 0235 | ACCGAAAGGUCUUACCGGA |
| Luc | 25 | SEQ. ID 0236 | GUACCGAAAGGUCUUACCG |
| Luc | 26 | SEQ. ID 0237 | AAGUACCGAAAGGUCUUAC |
| Luc | 27 | SEQ. ID 0238 | CGAAGUACCGAAAGGUCUU |
| Luc | 28 | SEQ. ID 0239 | GACGAAGUACCGAAAGGUC |
| Luc | 29 | SEQ. ID 0240 | UGGACGAAGUACCGAAAGG |
| Luc | 30 | SEQ. ID 0241 | UGUGGACGAAGUACCGAAA |
| Luc | 31 | SEQ. ID 0242 | UUUGUGGACGAAGUACCGA |
| Luc | 32 | SEQ. ID 0243 | UGUUUGUGGACGAAGUACC |
| Luc | 33 | SEQ. ID 0244 | UGUGUUUGUGGACGAAGUA |
| Luc | 34 | SEQ. ID 0245 | GUUGUGUUUGUGGACGAAG |
| Luc | 35 | SEQ. ID 0246 | GAGUUGUGUUUGUGGACCA |
| Luc | 36 | SEQ. ID 0247 | AGGAGUUGUGUUUGUGGAC |
| Luc | 37 | SEQ. ID 0248 | GGAGGAGUUGUGUUUGUGG |
| Luc | 38 | SEQ. ID 0249 | GCGGAGGAGUUGUGUUUGU |
| Luc | 39 | SEQ. ID 0250 | GCGCGGAGGAGUUGUGUUU |
| Luc | 40 | SEQ. ID 0251 | UUGCGCGGAGGAGUUGUGU |
| Luc | 41 | SEQ. ID 0252 | AGUUGCGCGGAGGAGUUGU |
| Luc | 42 | SEQ. ID 0253 | AAAGUUGCGCGGAGGAGUU |
| Luc | 43 | SEQ. ID 0254 | AAAAAGUUGCGCGGAGGAG |
| Luc | 44 | SEQ. ID 0255 | CGAAAAAGUUGCGCGGAGG |
| Luc | 45 | SEQ. ID 0256 | CGCGAAAAAGUUGCGCGGA |
| Luc | 46 | SEQ. ID 0257 | ACCGCGAAAAAGUUGCGCG |
| Luc | 47 | SEQ. ID 0258 | CAACCGCGAAAAAGUUGCG |
| Luc | 48 | SEQ. ID 0259 | AACAACCGCGAAAAAGUUG |
| Luc | 49 | SEQ. ID 0260 | GUAACAACCGCGAAAAAGU |
| Luc | 50 | SEQ. ID 0261 | AAGUAACAACCGCGAAAAA |
| Luc | 51 | SEQ. ID 0262 | UCAAGUAACAACCGCGAAA |
| Luc | 52 | SEQ. ID 0263 | AGUCAAGUAACAACCGCGA |
| Luc | 53 | SEQ. ID 0264 | CCAGUCAAGUAACAACCGC |
| Luc | 54 | SEQ. ID 0265 | CGCCAGUCAAGUAACAACC |
| Luc | 55 | SEQ. ID 0266 | GUCGCCAGUCAAGUAACAA |
| Luc | 56 | SEQ. ID 0267 | ACGUCGCCAGUCAAGUAAC |
| Luc | 57 | SEQ. ID 0268 | UUACGUCGCCAGUCAAGUA |
| Luc | 58 | SEQ. ID 0269 | GAUUACGUCGCCAGUCAAG |
| Luc | 59 | SEQ. ID 0270 | UGGAUUACGUCGCCAGUCA |
| Luc | 60 | SEQ. ID 0271 | CGUGGAUUACGUCGCCAGU |
| Luc | 61 | SEQ. ID 0272 | AUCGUGGAUUACGUCGCCA |
| Luc | 62 | SEQ. ID 0273 | AGAUCGUGGAUUACGUCGC |
| Luc | 63 | SEQ. ID 0274 | AGAGAUCGUGGAUUACGUC |
| Luc | 64 | SEQ. ID 0275 | AAAGAGAUCGUGGAUUACG |
| Luc | 65 | SEQ. ID 0276 | AAAAAGAGAUCGUGGAUUA |
| Luc | 66 | SEQ. ID 0277 | GGAAAAAGAGAUCGUGGAU |
| Luc | 67 | SEQ. ID 0278 | ACGGAAAAAGAGAUCGUGG |
| Luc | 68 | SEQ. ID 0279 | UGACGGAAAAAGAGAUCGU |
| Luc | 69 | SEQ. ID 0280 | GAUGACGGAAAAAGAGAUC |
| Luc | 70 | SEQ. ID 0281 | ACGAUGACGGAAAAAGAGA |
| Luc | 71 | SEQ. ID 0282 | AGACGAUGACGGAAAAAGA |
| Luc | 72 | SEQ. ID 0283 | AAAGACGAUGACGGAAAAA |
| Luc | 73 | SEQ. ID 0284 | GGAAAGACGAUGACGGAAA |
| Luc | 74 | SEQ. ID 0285 | ACGGAAAGACGAUGACGGA |
| Luc | 75 | SEQ. ID 0286 | GCACGGAAAGACGAUGACG |
| Luc | 76 | SEQ. ID 0287 | GAGCACGGAAAGACGAUGA |
| Luc | 77 | SEQ. ID 0288 | UGGAGCACGGAAAGACGAU |
| Luc | 78 | SEQ. ID 0289 | UUUGGAGCACGGAAAGACG |
| Luc | 79 | SEQ. ID 0290 | GUUUUGGAGCACGGAAAGA |
| Luc | 80 | SEQ. ID 0291 | UUGUUUUGGAGCACGGAAA |
| Luc | 81 | SEQ. ID 0292 | UGUUGUUUUGGAGCACGGA |
| Luc | 82 | SEQ. ID 0293 | GUUGUUGUUUUGGAGCACG |
| Luc | 83 | SEQ. ID 0294 | CCGUUGUUGUUUUGGAGCA |
| Luc | 84 | SEQ. ID 0295 | CGCCGUUGUUGUUUUGGAG |
| Luc | 85 | SEQ. ID 0296 | GCCGCCGUUGUUGUUUUGG |
| Luc | 86 | SEQ. ID 0297 | CCGCCGCCGUUGUUGUUUU |
| Luc | 87 | SEQ. ID 0298 | UCCCGCCGCCGUUGUUGUU |
| Luc | 88 | SEQ. ID 0299 | CUUCCCGCCGCCGUUGUUG |
| Luc | 89 | SEQ. ID 0300 | AACUUCCCGCCGCCGUUGU |
| Luc | 90 | SEQ. ID 0301 | UGAAGUUCCCGCCGCCGUU |

### Example II

### Validation of the Algorithm Using DBI, Luciferase, PLK, EGFR, and SEAP

[0390] The algorithm (Formula VIII) identified siRNAs for five genes, human DBI, firefly luciferase (fLuc), renilla luciferase (rLuc), human PLK, and human secreted alkaline phosphatase (SEAP). Four individual siRNAs were selected on the basis of their SMARTSCORES™ derived by analysis of their sequence using Formula VIII (all of the siRNAs would be selected with Formula IX as well) and analyzed for their ability to silence their targets' expression. In addition to the scoring, a BLAST search was conducted for each siRNA. To minimize the potential for off-target silencing effects, only those target sequences with more than three mismatches against un-related sequences were selected. Semizarov, et al. (2003) Specificity of short interfering RNA determined through gene expression signatures, Proc. Natl. Acad. Sci. USA, 100:6347. These duplexes were analyzed individually and in pools of 4 and compared with several siRNAs that were randomly selected. The functionality was measured as a percentage of targeted gene knockdown as compared to controls. All siRNAs were transfected as described by the methods above at 100 nM concentration into HEK293 using Lipofectamine 2000. The level of the targeted gene expression was evaluated by B-DNA as described above and normalized to the non-specific control. FIG. 10 shows that the siRNAs selected by the algorithm disclosed herein were significantly more potent than randomly selected siRNAs. The algorithm increased the chances of identifying an F50 siRNA from 48% to 91%, and an F80 siRNA from 13% to 57%. In addition, pools of SMART siRNA silence the selected target better than randomly selected pools (see FIG. 10F).

### Example III

### Validation of the Algorithm Using Genes Involved in Clathrin-Dependent Endocytosis

[0391] Components of clathrin-mediated endocytosis pathway are key to modulating intracellular signaling and play important roles in disease. Chromosomal rearrangements that result in fusion transcripts between the Mixed-Lineage Leukemia gene (MLL) and CALM (clathrin assembly lymphoid myeloid leukemia gene) are believed to play a role in leukemogenesis. Similarly, disruptions in Rab7 and Rab9, as well as HIP1 (Huntingtin-interacting protein), genes that are believed to be involved in endocytosis, are potentially responsible for ailments resulting in lipid storage, and neuronal diseases, respectively. For these reasons, siRNA directed against clathrin and other genes involved in the clathrin-mediated endocytotic pathway are potentially important research and therapeutic tools.

[0392] siRNAs directed against genes involved in the clathrin-mediated endocytosis pathways were selected using Formula VIII. The targeted genes were clathrin heavy chain (CHC, accession # NM_{—}004859), clathrin light chain A (CLCa, NM_{—}001833), clathrin light chain B (CLCb, NM_{—}001834), CALM (U45976), β2 subunit of AP-2 (β2, NM_{—}001282), Eps15 (NM_{—}001981), Eps15R (NM_{—}021235), dynamin II (DYNII, NM_{—}004945), Rab5a (BC001267), Rab5b (NM_{—}002868), Rab5c (AF141304), and EEA.1 (XM_{—}018197).

[0393] For each gene, four siRNAs duplexes with the highest scores were selected and a BLAST search was conducted for each of them using the Human EST database. In order to minimize the potential for off-target silencing effects, only those sequences with more than three mismatches against un-related sequences were used. All duplexes were synthesized at Dharmacon, Inc. as 21-mers with 3′-UU overhangs using a modified method of 2′-ACE chemistry, Scaringe (2000) Advanced 5′-silyl-2′-orthoester approach to RNA oligonucleotide synthesis, Methods Enzymol. 317:3, and the antisense strand was chemically phosphorylated to insure maximized activity.

[0394] HeLa cells were grown in Dulbecco's modified Eagle's medium (DMEM) containing 10% fetal bovine serum, antibiotics and glutamine. siRNA duplexes were resuspended in 1× siRNA Universal buffer (Dharmacon, Inc.) to 20 μM prior to transfection. HeLa cells in 12-well plates were transfected twice with 4 μl of 20 μM siRNA duplex in 3 μl Lipofectamine 2000 reagent (Invitrogen, Carlsbad, Calif., USA) at 24-hour intervals. For the transfections in which 2 or 3 siRNA duplexes were included, the amount of each duplex was decreased, so that the total amount was the same as in transfections with single siRNAs. Cells were plated into normal culture medium 12 hours prior to experiments, and protein levels were measured 2 or 4 days after the first transfection.

[0395] Equal amounts of lysates were resolved by electrophoresis, blotted, and stained with the antibody specific to targeted protein, as well as antibodies specific to unrelated proteins, PP1 phosphatase and Tsg101 (not shown). The cells were lysed in Triton X-100/glycerol solubilization buffer as described previously. Tebar, Bohlander, & Sorkin (1999) Clathrin Assembly Lymphoid Myeloid Leukemia (CALM) Protein: Localization in Endocytic-coated Pits, Interactions with Clathrin, and the Impact of Overexpression on Clathrin-mediated Traffic, Mol. Biol. Cell, 10:2687. Cell lysates were electrophoresed, transferred to nitrocellulose membranes, and Western blotting was performed with several antibodies followed by detection using enhanced chemiluminescence system (Pierce, Inc). Several x-ray films were analyzed to determine the linear range of the chemiluminescence signals, and the quantifications were performed using densitometry and AlphaImager v5.5 software (Alpha Innotech Corporation). In experiments with Eps15R-targeted siRNAs, cell lysates were subjected to immunoprecipitation with Ab860, and Eps15R was detected in immunoprecipitates by Western blotting as described above.

[0396] The antibodies to assess the levels of each protein by Western blot were obtained from the following sources: monoclonal antibody to clathrin heavy chain (TD.1) was obtained from American Type Culture Collection (Rockville, Md., USA); polyclonal antibody to dynamin II was obtained from Affinity Bioreagents, Inc. (Golden, Colo., USA); monoclonal antibodies to EEA.1 and Rab5a were purchased from BD Transduction Laboratories (Los Angeles, Calif., USA); the monoclonal antibody to Tsg101 was purchased from Santa Cruz Biotechnology, Inc. (Santa Cruz, Calif., USA); the monoclonal antibody to GFP was from ZYMED Laboratories Inc. (South San Francisco, Calif., USA); the rabbit polyclonal antibodies Ab32 specific to α-adaptins and Ab20 to CALM were described previously (Sorkin et al. (1995) Stoichiometric Interaction of the Epidermal Growth Factor Receptor with the Clathrin-associated Protein Complex AP-2, J. Biol. Chem)., 270:619), the polyclonal antibodies to clathrin light chains A and B were kindly provided by Dr. F. Brodsky (UCSF); monoclonal antibodies to PP1 (BD Transduction Laboratories) and α-Actinin (Chemicon) were kindly provided by Dr. M. Dell'Acqua (University of Colorado); Eps15 Ab577 and Eps15R Ab860 were kindly provided by Dr. P. P. Di Fiore (European Cancer Institute).

[0397] FIG. 11 demonstrates the in vivo functionality of 48 individual siRNAs, selected using Formula VIII (most of them will meet the criteria incorporated by Formula IX as well) targeting 12 genes. Various cell lines were transfected with siRNA duplexes (Dupl-4) or pools of siRNA duplexes (Pool), and the cells were lysed 3 days after transfection with the exception of CALM (2 days) and β2 (4 days).

[0398] Note a β1-adaptin band (part of AP-1 Golgi adaptor complex) that runs slightly slower than β2 adaptin. CALM has two splice variants, 66 and 72 kD. The full-length Eps15R (a doublet of ˜130 kD) and several truncated spliced forms of ˜100 kD and ˜70 kD were detected in Eps15R immunoprecipitates (shown by arrows). The cells were lysed 3 days after transfection. Equal amounts of lysates were resolved by electrophoresis and blotted with the antibody specific to a targeted protein (GFP antibody for YFP fusion proteins) and the antibody specific to unrelated proteins PP1 phosphatase or α-actinin, and TSG101. The amount of protein in each specific band was normalized to the amount of non-specific proteins in each lane of the gel. Nearly all of them appear to be functional, which establishes that Formula VIII and IX can be used to predict siRNAs' functionality in general in a genome wide manner.

[0399] To generate the fusion of yellow fluorescent protein (YFP) with Rab5b or Rab5c (YFP-Rab5b or YFP-Rab5c), a DNA fragment encoding the full-length human Rab5b or Rab5c was obtained by PCR using Pfu polymerase (Stratagene) with a SacI restriction site introduced into the 5′ end and a KpnI site into the 3′ end and cloned into pEYFP-C1 vector (CLONTECH, Palo Alto, Calif., USA). GFP-CALM and YFP-Rab5a were described previously (Tebar, Bohlander, & Sorkin (1999) Clathrin Assembly Lymphoid Myeloid Leukemia (CALM) Protein: Localization in Endocytic-coated Pits, Interactions with Clathrin, and the Impact of Overexpression on Clathrin-mediated Traffic, Mol. Biol. Cell 10:2687).

### Example IV

### Validation of the Algorithm Using EG5, GADPH, ATE1, MEK2, MEK1, QB, LAMINA/C, C-Myc, Human Cyclophilin, and Mouse Cyclophilin

[0400] A number of genes have been identified as playing potentially important roles in disease etiology. Expression profiles of normal and diseased kidneys has implicated Edg5 in immunoglobulin A neuropathy, a common renal glomerular disease. Myc1, MEK1/2 and other related kinases have been associated with one or more cancers, while lamins have been implicated in muscular dystrophy and other diseases. For these reasons, siRNA directed against the genes encoding these classes of molecules would be important research and therapeutic tools.

[0401] FIG. 12 illustrates four siRNAs targeting 10 different genes (Table V for sequence and accession number information) that were selected according to the Formula VIII and assayed as individuals and pools in HEK293 cells. The level of siRNA induced silencing was measured using the B-DNA assay. These studies demonstrated that thirty-six out of the forty individual SMART-selected siRNA tested are functional (90%) and all 10 pools are fully functional.

### Example V

### Validation of the Algorithm Using Bcl2

[0402] Bcl-2 is a ˜25 kD, 205-239 amino acid, anti-apoptotic protein that contains considerable homology with other members of the BCL family including BCLX, MCL1, BAX, BAD, and BIK. The protein exists in at least two forms (Bcl2a, which has a hydrophobic tail for membrane anchorage, and Bcl2b, which lacks the hydrophobic tail) and is predominantly localized to the mitochondrial membrane. While Bcl2 expression is widely distributed, particular interest has focused on the expression of this molecule in B and T cells. Bcl2 expression is down-regulated in normal germinal center B cells yet in a high percentage of follicular lymphomas, Bcl2 expression has been observed to be elevated. Cytological studies have identified a common translocation ((14; 18)(q32; q32)) amongst a high percentage (>70%) of these lymphomas. This genetic lesion places the Bcl2 gene in juxtaposition to immunoglobulin heavy chain gene (IgH) encoding sequences and is believed to enforce inappropriate levels of gene expression, and resistance to programmed cell death in the follicle center B cells. In other cases, hypomethylation of the Bcl2 promoter leads to enhanced expression and again, inhibition of apoptosis. In addition to cancer, dysregulated expression of Bcl-2 has been correlated with multiple sclerosis and various neurological diseases.

[0403] The correlation between Bcl-2 translocation and cancer makes this gene an attractive target for RNAi. Identification of siRNA directed against the bcl2 transcript (or Bcl2-IgH fusions) would further our understanding Bcl2 gene function and possibly provide a future therapeutic agent to battle diseases that result from altered expression or function of this gene.

In Silico Identification of Functional siRNA

[0404] To identify functional and hyperfunctional siRNA against the Bcl2 gene, the sequence for Bcl-2 was downloaded from the NCBI Unigene database and analyzed using the Formula VIII algorithm. As a result of these procedures, both the sequence and SMARTSCORES™, or siRNA rankings of the Bcl2 siRNA were obtained and ranked according to their functionality. Subsequently, these sequences were BLAST'ed (database) to insure that the selected sequences were specific and contained minimal overlap with unrelated genes. The SMARTSCORES™, or siRNA rankings for the top 10 Bcl-2 siRNA are identified in FIG. 13.

In Vivo Testing of Bcl-2 SiRNA

[0405] Bcl-2 siRNAs having the top ten SMARTSCORES™, or siRNA rankings were selected and tested in a functional assay to determine silencing efficiency. To accomplish this, each of the ten duplexes were synthesized using 2′-O-ACE chemistry and transfected at 100 nM concentrations into cells. Twenty-four hours later assays were performed on cell extracts to assess the degree of target silencing. Controls used in these experiments included mock transfected cells, and cells that were transfected with a non-specific siRNA duplex.

[0406] The results of these experiments are presented below (and in FIG. 14) and show that all ten of the selected siRNA induce 80% or better silencing of the Bc12 message at 100 nM concentrations. These data verify that the algorithm successfully identified functional Bcl2 siRNA and provide a set of functional agents that can be used in experimental and therapeutic environments.

| | | | |
|---|---|---|---|
| siRNA | 1 | GGGAGAUAGUGAUGAAGUA | SEQ. ID NO. 302 |
| siRNA | 2 | GAAGUACAUCCAUUAUAAG | SEQ. ID NO. 303 |
| siRNA | 3 | GUACGACAACCGGGAGAUA | SEQ. ID NO. 304 |
| siRNA | 4 | AGAUAGUGAUGAAGUACAU | SEQ. ID NO. 305 |
| siRNA | 5 | UGAAGACUCUGCUCAGUUU | SEQ. ID NO. 306 |
| siRNA | 6 | GCAUGCGGCCUCUGUUUGA | SEQ. ID NO. 307 |
| siRNA | 7 | UGCGGCCUCUGUUUGAUUU | SEQ. ID NO. 308 |
| siRNA | 8 | GAGAUAGUGAUGAAGUACA | SEQ. ID NO. 309 |
| siRNA | 9 | GGAGAUAGUGAUGAAGUAC | SEQ. ID NO. 310 |
| siRNA | 10 | GAAGACUCUGCUCAGUUUG | SEQ. ID NO. 311 |

Bcl2 siRNA: Sense Strand, 5′→3′

### Example VI

### Sequences Selected by the Algorithm

[0407] Sequences of the siRNAs selected using Formulas (Algorithms) VIII and IX with their corresponding ranking, which have been evaluated for the silencing activity in vivo in the present study (Formula VIII and IX, respectively) are shown in Table V. It should be noted that the “t” residues in Table V, and elsewhere, when referring to siRNA, should be replaced by “u” residues.

TABLE V

| | | | | | |
|---|---|---|---|---|---|
| | | | | FORMULA | FORMULA |
| GENE | Name | SEQ. ID No. | FTLLSEQTENCE | VIII | IX |

| | | | | | |
|---|---|---|---|---|---|
| CLTC | NM_004859 | 0312 | GAAAGAATCTGTAGAGAAA | 76 | 94.2 |
| CLTC | NM_004859 | 0313 | GCAATGAGCTGTTTGAAGA | 65 | 39.9 |
| CLTC | NM_004859 | 0314 | TGACAAAGGTGGATAAATT | 57 | 38.2 |
| CLTC | NM_004859 | 0315 | GGAAATGGATCTCTTTGAA | 54 | 49.4 |
| CLTA | NM_001833 | 0316 | GGAAAGTAATGGTCCAACA | 22 | 55.5 |
| CLTA | NM_001833 | 0317 | AGACAGTTATGCAGCTATT | 4 | 22.9 |
| CLTA | NM_001833 | 0318 | CCAATTCTCGGAAGCAAGA | 1 | 17 |
| CLTA | NM_001833 | 0319 | GAAAGTAATGGTCCAACAG | −1 | −13 |
| CLTB | NM_001834 | 0320 | GCGCCAGAGTGAACAAGTA | 17 | 57.5 |
| CLTB | NM_001834 | 0321 | GAAGGTGGCCCAGCTATGT | 15 | −8.6 |
| CLTB | NM_001834 | 0322 | GGAACCAGCGCCAGAGTGA | 13 | 40.5 |
| CLTB | NM_001834 | 0323 | GAGCGAGATTGCAGGCATA | 20 | 61.7 |
| CALM | U45976 | 0324 | GTTAGTATCTGATGACTTC | 36 | −34.6 |
| CALM | U45976 | 0325 | GAAATGGAACCACTAAGAA | 33 | 46.1 |
| CALM | U45976 | 0326 | GGAAATGGAACCACTAAGA | 30 | 61.2 |
| CALM | U45976 | 0327 | CAACTACACTTTCCAATGC | 28 | 6.8 |
| EPS15 | NM_001981 | 0328 | CCACCAAGATTTCATGATA | 48 | 25.2 |
| EPS15 | NM_001981 | 0329 | GATCGGAACTCCAACAAGA | 43 | 49.3 |
| EPS15 | NM_001981 | 0330 | AAACGGAGCTACAGATTAT | 39 | 11.5 |
| EPS15 | NM_001981 | 0331 | CCACACAGCATTCTTGTAA | 33 | −23.6 |
| EPS15R | NM_021235 | 0332 | GAAGTTACCTTGAGCAATC | 48 | 33 |
| EPS15R | NM_021235 | 0333 | GGACTTGGCCGATCCAGAA | 27 | 33 |
| EPS15R | NM_021235 | 0334 | GCACTTGGATCGAGATGAG | 20 | 1.3 |
| EPS15R | NM_021235 | 0335 | CAAAGACCAATTCGCGTTA | 17 | 27.7 |
| DNM2 | NM_004945 | 0336 | CCGAATCAATCGCATCTTC | 6 | −29.6 |
| DNM2 | NM_004945 | 0337 | GACATGATCCTGCAGTTCA | 5 | −14 |
| DNM2 | NM_004945 | 0338 | GAGCGAATCGTCACCACTT | 5 | 24 |
| DNM2 | NM_004945 | 0339 | CCTCCGAGCTGGCGTCTAC | −4 | −63.6 |
| ARF6 | AF93885 | 0340 | TCACATGGTTAACCTCTAA | 27 | −21.1 |
| ARF6 | AF93885 | 0341 | GATGAGGGACGCCATAATC | 7 | −38.4 |
| ARF6 | AF93885 | 0342 | CCTCTAACTACAAATCTTA | 4 | 16.9 |
| ARF6 | AF93885 | 0343 | GGAAGGTGCTATCCAAAAT | 4 | 11.5 |
| RAB5A | BC001267 | 0344 | GCAAGCAAGTCCTAACATT | 40 | 25.1 |
| RAB5A | BC001267 | 0345 | GGAAGAGGAGTAGACCTTA | 17 | 50.1 |
| RAB5A | BC001267 | 0346 | AGGAATCAGTGTTGTAGTA | 16 | 11.5 |
| RAB5A | BC001267 | 0347 | GAAGAGGAGTAGACCTTAC | 12 | 7 |
| RAB5B | NM_002868 | 0348 | GAAAGTCAAGCCTGGTATT | 14 | 18.1 |
| RAB5B | NM_002868 | 0349 | AAAGTCAAGCCTGCTATTA | 6 | −17.8 |
| RAB5B | NM_002868 | 0350 | GCTATGAACGTGAATGATC | 3 | −21.1 |
| RAB5B | NM_002868 | 0351 | CAAGCCTGGTATTACGTTT | −7 | −37.5 |
| RAB5C | AF141304 | 0352 | GGAACAAGATCTGTCAATT | 38 | 51.9 |
| RAB5C | AF141304 | 0353 | GCAATGAACGTGAACGAAA | 29 | 43.7 |
| RAB5C | AF141304 | 0354 | CAATGAACGTGAACGAAAT | 18 | 43.3 |
| RAB5C | AF141304 | 0355 | GGACAGGAGCGGTATCACA | 6 | 18.2 |
| EEA1 | XM_018197 | 0356 | AGACAGAGCTTGAGAATAA | 67 | 64.1 |
| EEA1 | XM_018197 | 0357 | GAGAAGATCTTTATGCAAA | 60 | 48.7 |
| EEA1 | XM_018197 | 0358 | GAAGAGAAATCAGCAGATA | 58 | 45.7 |
| EEA1 | XM_018197 | 0359 | GCAAGTAACTCAACTAACA | 56 | 72.3 |
| AP2B1 | NM_001282 | 0360 | GAGCTAATCTGCCACATTG | 49 | −12.4 |
| AP2B1 | NM_001282 | 0361 | GCAGATGAGTTACTAGAAA | 44 | 48.9 |
| AP2B1 | NM_001282 | 0362 | CAACTTAATTGTCCAGAAA | 41 | 28.2 |
| AP2B1 | NM_001282 | 0363 | CAACACAGGATTCTGATAA | 33 | −5.8 |
| PLK | NM_005030 | 0364 | AGATTGTGCCTAAGTCTCT | −35 | −3.4 |
| PLK | NM_005030 | 0365 | ATGAAGATCTGGAGGTGAA | 0 | −4.3 |
| PLK | NM_005030 | 0366 | TTTGAGACTTCTTGCCTAA | −5 | −27.7 |
| PLK | NM_005030 | 0367 | AGATCACCCTCCTTAAATA | 15 | 72.3 |
| GAPDH | NM_002046 | 0368 | CAACGGATTTGGTCGTATT | 27 | −2.8 |
| CAPDH | NM_002046 | 0369 | GAAATCCCATCACCATCTT | 24 | 3.9 |
| CAPDH | NM_002046 | 0370 | GACCTCAACTACATGGTTT | 22 | −22.9 |
| GAPDH | NM_002046 | 0371 | TGGTTTACATGTTCCAATA | 9 | 9.8 |
| c-Myc | | 0372 | GAAGAAATCGATGTTGTTT | 31 | −11.7 |
| c-Myc | | 0373 | ACACAAACTTGAACAGCTA | 22 | 51.3 |
| c-Myc | | 0374 | GGAAGAAATCGATGTTGTT | 18 | 26 |
| c-Myc | | 0375 | GAAACGACGAGAACAGTTG | 18 | −8.9 |
| MAP2K1 | NM_002755 | 0376 | GCACATGGATGGAGGTTCT | 26 | 16 |
| MAP2K1 | NM_002755 | 0377 | GCAGAGACAGCAGATTTGA | 16 | 0.4 |
| MAP2K1 | NM_002755 | 0378 | GAGGTTCTCTGGATCAAGT | 14 | 15.5 |
| MAP2K1 | NM_002755 | 0379 | GAGCAGATTTGAAGCAACT | 14 | 18.5 |
| MAP2K2 | NM_030662 | 0380 | CAAAGACGATGACTTCGAA | 37 | 26.4 |
| MAP2K2 | NM_030662 | 0381 | GATCAGCATTTGCATGGAA | 24 | −0.7 |
| MAP2K2 | NM_030662 | 0382 | TCCAGGAGTTTGTCAATAA | 17 | −4.5 |
| MAP2K2 | NM_030662 | 0383 | GGAAGCTGATCCACCTTGA | 16 | 59.2 |
| KNSL1 (EG5) | NM_004523 | 0384 | GCAGAAATCTAAGGATATA | 53 | 35.8 |
| KNSL1 (EG5) | NM_004523 | 0385 | CAACAAGGATGAAGTCTAT | 50 | 18.3 |
| KNSL1 (EG5) | NM_004523 | 0386 | CAGCAGAAATCTAAGGATA | 41 | 32.7 |
| KNSL1 (EG5) | NM_004523 | 0387 | CTAGATGGCTTTCTCAGTA | 39 | 3.9 |
| CyclophilinA | NM_021130 | 0388 | AGACAAGGTCCCAAAGACA | −16 | 58.1 |
| CyclophilinA | NM_021130 | 0389 | GGAATGGCAAGACCAGCAA | −6 | 36 |
| CyclophilinA | NM_021130 | 0390 | AGAATTATTCCAGGGTTTA | −3 | 16.1 |
| CyclophilinA | NM_021130 | 0391 | GCAGACAAGGTCCCAAAGA | 8 | 8.9 |
| LAMIN A/C | NM_170707 | 0392 | AGAAGCAGCTTCAGGATGA | 31 | 38.8 |
| LAMIN A/C | NM_170707 | 0393 | GAGCTTGACTTCCAGAAGA | 33 | 22.4 |
| LAMIN A/C | NM_170707 | 0394 | CCACCCAAGTTCACCCTAA | 21 | 27.5 |
| LAMIN A/C | NM_170707 | 0395 | GAGAAGAGCTCCTCCATCA | 55 | 30.1 |
| CyclophilinB | M60857 | 0396 | GAAAGAGCATCTACGGTGA | 41 | 83.9 |
| CyclophilinB | M60857 | 0397 | GAAAGGATTTGGCTACAAA | 53 | 59.1 |
| CyclophilinB | M60857 | 0398 | ACAGCAAATTCCATCGTGT | −20 | 28.8 |
| CyclophilinB | M60857 | 0399 | GGAAAGACTGTTCCAAAAA | 2 | 27 |
| DBI1 | NM_020548 | 0400 | CAACACGCCTCATCCTCTA | 27 | −7.6 |
| DBI2 | NM_020548 | 0401 | CATGAAAGCTTACATCAAC | 25 | −30.8 |
| DBI3 | NM_020548 | 0402 | AAGATGCCATGAAAGCTTA | 17 | 22 |
| DBI4 | NM_020548 | 0403 | GCACATACCGCCTGAGTCT | 15 | 3.9 |
| rLUC1 | | 0404 | GATCAAATCTGAAGAAGGA | 57 | 49.2 |
| rLUC2 | | 0405 | GCCAAGAAGTTTCCTAATA | 50 | 13.7 |
| rLUC3 | | 0406 | CAGCATATCTTGAACCATT | 41 | −2.2 |
| rLUC4 | | 0407 | GAACAAAGGAAACGGATGA | 39 | 29.2 |
| SeAP1 | NM_031313 | 0408 | CGGAAACGGTCCAGGCTAT | 6 | 26.9 |
| SeAP2 | NM_031313 | 0409 | GCTTCGAGCAGACATGATA | 4 | −11.2 |
| SeAP3 | NM_031313 | 0410 | CCTACACGGTCCTCCTATA | 4 | 4.9 |
| SeAP4 | NM_031313 | 0411 | GCCAAGAACCTCATCATCT | 1 | −9.9 |
| fLUC1 | | 0412 | GATATGGGCTGAATACAAA | 54 | 40.4 |
| fLUC2 | | 0413 | GCACTCTGATTGACAAATA | 47 | 54.7 |
| fLUC3 | | 0414 | TGAAGTCTCTGATTAAGTA | 46 | 34.5 |
| fLUC4 | | 0415 | TCAGAGACATCCTCATAAA | 40 | 11.4 |
| mCyclo_1 | NM_008907 | 0416 | GCAAGAAGATCACCATTTC | 52 | 46.4 |
| mCyclo_2 | NM_008907 | 0417 | GAGAGAAATTTGAGGATGA | 36 | 70.7 |
| mCyclo_3 | NM_008907 | 0418 | GAAAGGATTTGGCTATAAG | 35 | −1.5 |
| mcyclo_4 | NM_008907 | 0419 | GAAAGAAGGCATGAACATT | 27 | 10.3 |
| BCL2_1 | NM_000633 | 0420 | GGGAGATAGTGATGAAGTA | 21 | 72 |
| BCL2_2 | NM_000633 | 0421 | GAAGTACATCCATTATAAG | 1 | 3.3 |
| BCL2_3 | NM_000633 | 0422 | GTACGACAACCGGGAGATA | 1 | 35.9 |
| BCL2_4 | NM_000633 | 0423 | AGATAGTGATGAAGTACAT | −12 | 22.1 |
| BCL2_5 | NM_000633 | 0424 | TGAAGACTCTGCTCAGTTT | 36 | 19.1 |
| BCL2_6 | NM_000633 | 0425 | GCATGCGGCCTCTGTTTGA | 5 | −9.7 |
| QB1 | NM_003365.1 | 0426 | GCACACAGCUUACUACAUC | 52 | −4.8 |
| QB2 | NM_003365.1 | 0427 | GAAAUGCCCUGGUAUCUCA | 49 | 22.1 |
| QB3 | NM_003365.1 | 0428 | GAAGGAACGUGAUGUGAUC | 34 | 22.9 |
| QB4 | NM_003365.1 | 0429 | GCACUACUCCUGUGUGUGA | 28 | 20.4 |
| ATE1-1 | NM_007041 | 0430 | GAACCCAGCUGGAGAACUU | 45 | 15.5 |
| ATE1-2 | NM_007041 | 0431 | GAUAUACAGUGUGAUCUUA | 40 | 12.2 |
| ATE1-3 | NM_007041 | 0432 | GUACUACGAUCCUGAUUAU | 37 | 32.9 |
| ATE1-4 | NM_007041 | 0433 | GUGCCGACCUUUACAAUUU | 35 | 18.2 |
| EGFR-1 | NM_005228 | 0434 | GAAGGAAACTGAATTCAAA | 68 | 79.4 |
| EGFR-1 | NM_005228 | 0435 | GGAAATATGTACTACGAAA | 49 | 49.5 |
| EGFR-1 | NM_005228 | 0436 | CCACAAAGCAGTGAATTTA | 41 | 7.6 |
| EGFR-1 | NM_005228 | 0437 | GTAACAAGCTCACGCAGTT | 40 | 25.9 |

[0408] Many of the genes to which the described siRNA are directed play critical roles in disease etiology. For this reason, the siRNAs listed in the sequence listing may potentially act as therapeutic agents. A number of prophetic examples follow and should be understood in view of the siRNA that are identified in the sequence listing. To isolate these siRNAs, the appropriate message sequence for each gene is analyzed using one of the before mentioned formulas (preferably formula VIII) to identify potential siRNA targets. Subsequently these targets are BLAST'ed to eliminate homology with potential off-targets.

### Example VII

### Evidence for the Benefits of Pooling

[0409] Evidence for the benefits of pooling have been demonstrated using the reporter gene, luciferase. Ninety siRNA duplexes were synthesized using Dharmacon proprietary ACE® chemistry against one of the standard reporter genes: firefly luciferase. The duplexes were designed to start two base pairs apart and to cover approximately 180 base pairs of the luciferase gene (see sequences in Table III). Subsequently, the siRNA duplexes were co-transfected with a luciferase expression reporter plasmid into HEK293 cells using standard transfection protocols and luciferase activity was assayed at 24 and 48 hours.

[0410] Transfection of individual siRNAs showed standard distribution of inhibitory effect. Some duplexes were active, while others were not. FIG. 15 represents a typical screen of ninety siRNA duplexes (SEQ. ID NO. 0032-0120) positioned two base pairs apart. As the figure suggests, the functionality of the siRNA duplex is determined more by a particular sequence of the oligonucleotide than by the relative oligonucleotide position within a gene or excessively sensitive part of the mRNA, which is important for traditional anti-sense technology.

[0411] When two continuous oligonucleotides were pooled together, a significant increase in gene silencing activity was observed (see FIGS. 16A and B). A gradual increase in efficacy and the frequency of pools functionality was observed when the number of siRNAs increased to 3 and 4 (FIGS. 16A, 16B, 17A, and 17B). Further, the relative positioning of the oligonucleotides within a pool did not determine whether a particular pool was functional (see FIGS. 18A and 18B, in which 100% of pools of oligonucleotides distanced by 2, 10 and 20 base pairs were functional).

[0412] However, relative positioning may nonetheless have an impact. An increased functionality may exist when the siRNA are positioned continuously head to toe (5′ end of one directly adjacent to the 3′ end of the others).

[0413] Additionally, siRNA pools that were tested performed at least as well as the best oligonucleotide in the pool, under the experimental conditions whose results are depicted in FIG. 19. Moreover, when previously identified non-functional and marginally (semi) functional siRNA duplexes were pooled together in groups of five at a time, a significant functional cooperative action was observed (see FIG. 20). In fact, pools of semi-active oligonucleotides were 5 to 25 times more functional than the most potent oligonucleotide in the pool. Therefore, pooling several siRNA duplexes together does not interfere with the functionality of the most potent siRNAs within a pool, and pooling provides an unexpected significant increase in overall functionality

### Example VIII

### Additional Evidence of the Benefits of Pooling

[0414] Experiments were performed on the following genes: β-galactosidase, Renilla luciferase, and Secreted alkaline phosphatase, which demonstrates the benefits of pooling. (see FIGS. 21A, 21B and 21C). Individual and pools of siRNA (described in Figure legends 21A-C) were transfected into cells and tested for silencing efficiency. Approximately 50% of individual siRNAs designed to silence the above-specified genes were functional, while 100% of the pools that contain the same siRNA duplexes were functional.

### Example IX

### Highly Functional siRNA

[0415] Pools of five siRNAs in which each two siRNAs overlap to 10-90% resulted in 98% functional entities (>80% silencing). Pools of siRNAs distributed throughout the mRNA that were evenly spaced, covering an approximate 20-2000 base pair range, were also functional. When the pools of siRNA were positioned continuously head to tail relative to mRNA sequences and mimicked the natural products of Dicer cleaved long double stranded RNA, 98% of the pools evidenced highly functional activity (>95% silencing).

### Example X

### Human Cyclophilin B

[0416] Table III above lists the siRNA sequences for the human cyclophilin B protein. A particularly functional siRNA may be selected by applying these sequences to any of Formula I to VII above.

[0417] Alternatively, one could pool 2, 3, 4, 5 or more of these sequences to create a kit for silencing a gene. Preferably, within the kit there would be at least one sequence that has a relatively high predicted functionality when any of Formulas I-VII is applied.

### Example XI

### Sample Pools of siRNAs and their Application to Human Disease

[0418] The genetic basis behind human disease is well documented and siRNA may be used as both research or diagnostic tools and therapeutic agents, either individually or in pools. Genes involved in signal transduction, the immune response, apoptosis, DNA repair, cell cycle control, and a variety of other physiological functions have clinical relevance and therapeutic agents that can modulate expression of these genes may alleviate some or all of the associated symptoms. In some instances, these genes can be described as a member of a family or class of genes and siRNA (randomly, conventionally, or rationally designed) can be directed against one or multiple members of the family to induce a desired result.

[0419] To identify rationally designed siRNA to each gene, the sequence was analyzed using Formula VIII or Formula X to identify rationally designed siRNA. To confirm the activity of these sequences, the siRNA are introduced into a cell type of choice (e.g., HeLa cells, HEK293 cells) and the levels of the appropriate message are analyzed using one of several art proven techniques. siRNA having heightened levels of potency can be identified by testing each of the before mentioned duplexes at increasingly limiting concentrations. Similarly, siRNA having increased levels of longevity can be identified by introducing each duplex into cells and testing functionality at 24, 48, 72, 96, 120, 144, 168, and 192 hours after transfection. Agents that induce >95% silencing at sub-nanomolar concentrations and/or induce functional levels of silencing for >96 hours are considered hyperfunctional.

### Example XII

### Validation of Multigene Knockout Using RAB5 and EPS

[0420] Two or more genes having similar, overlapping functions often leads to genetic redundancy. Mutations that knockout only one of, e.g., a pair of such genes (also referred to as homologs) results in little or no phenotype due to the fact that the remaining intact gene is capable of fulfilling the role of the disrupted counterpart. To fully understand the function of such genes in cellular physiology, it is often necessary to knockout or knockdown both homologs simultaneously. Unfortunately, concomitant knockdown of two or more genes is frequently difficult to achieve in higher organisms (e.g., mice) thus it is necessary to introduce new technologies dissect gene function. One such approach to knocking down multiple genes simultaneously is by using siRNA. For example, FIG. 11 showed that rationally designed siRNA directed against a number of genes involved in the clathrin-mediated endocytosis pathway resulted in significant levels of protein reduction (e.g., >80%). To determine the effects of gene knockdown on clathrin-related endocytosis, internalization assays were performed using epidermal growth factor and transferrin. Specifically, mouse receptor-grade EGF (Collaborative Research Inc.) and iron-saturated human transferrin (Sigma) were iodinated as described previously (Jiang, X., Huang, F., Marusyk, A. & Sorkin, A. (2003) Mol Biol Cell 14, 858-70). HeLa cells grown in 12-well dishes were incubated with ¹²⁵I-EGF (1 ng/ml) or ¹²⁵I-transferrin (1 μg/ml) in binding medium (DMEM, 0.1% bovine serum albumin) at 37° C., and the ratio of internalized and surface radioactivity was determined during 5-min time course to calculate specific internalization rate constant kₑ as described previously (Jiang, X et al). The measurements of the uptakes of radiolabeled transferrin and EGF were performed using short time-course assays to avoid influence of the recycling on the uptake kinetics, and using low ligand concentration to avoid saturation of the clathrini-dependenit pathway (for EGF Lund, K. A., Opresko, L. K., Strarbuck, C., Walsh, B. J. & Wiley, H. S. (1990) J. Biol. Chem. 265, 15713-13723).

[0421] The effects of knocking down Rab5a, 5b, 5c, Eps, or Eps 15R (individually) are shown in FIG. 22 and demonstrate that disruption of single genes has little or no effect on EGF or Tfu internalization. In contrast, simultaneous knock down of Rab5a, 5b, and 5c, or Eps and Eps 15R, leads to a distinct phenotype (note: total concentration of siRNA in these experiments remained constant with that in experiments in which a single siRNA was introduced, see FIG. 23). These experiments demonstrate the effectiveness of using rationally designed siRNA to knockdown multiple genes and validates the utility of these reagents to override genetic redundancy.

### Example XIII

### Validation of Multigene Targeting Using G6PD, GAPDH, PLK, AND UQC

[0422] Further demonstration of the ability to knock down expression of multiple genes using rationally designed siRNA was performed using pools of siRNA directed against four separate genes. To achieve this, siRNA were transfected into cells (total siRNA concentration of 100 nM) and assayed twenty-four hours later by B-DNA. Results shown in FIG. 24 show that pools of rationally designed molecules are capable of simultaneously silencing four different genes.

### Example XIV

### Validation of Multigene Knockouts as Demonstrated by Gene Expression Profiling, a Prophetic Example

[0423] To further demonstrate the ability to concomitantly knockdown the expression of multiple gene targets, single siRNA or siRNA pools directed against a collection of genes (e.g., 4, 8, 16, or 23 different targets) are simultaneously transfected into cells and cultured for twenty-four hours. Subsequently, mRNA is harvested from treated (and untreated) cells and labeled with one of two fluorescent probes dyes (e.g., a red fluorescent probe for the treated cells, a green fluorescent probe for the control cells.). Equivalent amounts of labeled RNA from each sample is then mixed together and hybridized to sequences that have been linked to a solid support (e.g., a slide, “DNA CHIP”). Following hybridization, the slides are washed and analyzed to assess changes in the levels of target genes induced by siRNA.

### Example XV

### Identifying Hyperfunctional siRNA

Identification of Hyperfunctional Bcl2 siRNA

[0424] The ten rationally designed Bcl2 siRNA (identified in FIG. 13, 14) were tested to identify hyperpotent reagents. To accomplish this, each of the ten Bcl-2 siRNA were individually transfected into cells at a 300 pM (0.3 nM) concentrations. Twenty-four hours later, transcript levels were assessed by B-DNA assays and compared with relevant controls. As shown in FIG. 25, while the majority of Bcl-2 siRNA failed to induce functional levels of silencing at this concentration, siRNA 1 and 8 induced >80% silencing, and siRNA 6 exhibited greater than 90% silencing at this subnanomolar concentration.

[0425] By way of prophetic examples, similar assays could be performed with any of the groups of rationally designed genes described in the Examples. Thus for instance, rationally designed siRNA sequences directed against a gene of interest could be introduced into cells at increasingly limiting concentrations to determine whether any of the duplexes are hyperfunctional.

### Example XVI

### Gene Silencing

### Prophetic Example

[0426] Below is an example of how one might transfect a cell.

[0427] Select a cell line. The selection of a cell line is usually determined by the desired application. The most important feature to RNAi is the level of expression of the gene of interest. It is highly recommended to use cell lines for which siRNA transfection conditions have been specified and validated.

[0428] Plate the cells. Approximately 24 hours prior to transfection, plate the cells at the appropriate density so that they will be approximately 70-90% confluent, or approximately 1×10⁵ cells/ml at the time of transfection. Cell densities that are too low may lead to toxicity due to excess exposure and uptake of transfection reagent-siRNA complexes. Cell densities that are too high may lead to low transfection efficiencies and little or no silencing. Incubate the cells overnight. Standard incubation conditions for mammalian cells are 37° C. in 5% CO₂. Other cell types, such as insect cells, require different temperatures and CO₂ concentrations that are readily ascertainable by persons skilled in the art. Use conditions appropriate for the cell type of interest.

[0429] siRNA re-suspension. Add 20 μl siRNA universal buffer to each siRNA to generate a final concentration of 50 μM.

[0430] siRNA-lipid complex formation. Use RNase-free solutions and tubes. Using the following table, Table XI:

TABLE XI

| | |
|---|---|
| 96-WELL | 24-WELL |

MIXTURE 1 (TRANSIT-TKO-PLASMID DILUTION MIXTURE)

| | | | | |
|---|---|---|---|---|
| Opti-MEM | 9.3 | μl | 46.5 | μl |
| TransIT-TKO (1 μg/μl) | 0.5 | μl | 2.5 | μl |
| MIXTURE 1 | 10.0 | μl | 50.0 | μl |
| FINAL VOLUME | | | | |

MIXTURE 2 (SIRNA DILUTION MIXTURE)

| | | | | |
|---|---|---|---|---|
| Opti-MEM | 9.0 | μl | 45.0 | μl |
| siRNA (1 μM) | 1.0 | μl | 5.0 | μl |
| MIXTURE 2 | 10.0 | μl | 50.0 | μl |
| FINAL VOLUME | | | | |

MIXTURE 3 (SIRNA-TRANSFECTION REAGENT MIXTURE)

| | | | | |
|---|---|---|---|---|
| Mixture 1 | 10 | μl | 50 | μl |
| Mixture 2 | 10 | μl | 50 | μl |
| MIXTURE 3 | 20 | μl | 100 | μl |
| FINAL VOLUME | | | | |

Incubate 20 minutes at room temperature

MIXTURE 4 (MEDIA-SIRNA/TRANSFECTION
REAGENT MIXTURE)

| | | | | |
|---|---|---|---|---|
| Mixture 3 | 20 | μl | 100 | μl |
| Complete media | 80 | μl | 400 | μl |
| MIXTURE 4 | 100 | μl | 500 | μl |
| FINAL VOLUME | | | | |

Incubate 48 hours at 37° C.

[0431] Transfection. Create a Mixture 1 by combining the specified amounts of OPTI-MEM serum free media and transfection reagent in a sterile polystyrene tube. Create a Mixture 2 by combining specified amounts of each siRNA with OPTI-MEM media in sterile 1 ml tubes. Create a Mixture 3 by combining specified amounts of Mixture 1 and Mixture 2. Mix gently (do not vortex) and incubate at room temperature for 20 minutes. Create a Mixture 4 by combining specified amounts of Mixture 3 to complete media. Add appropriate volume to each cell culture well. Incubate cells with transfection reagent mixture for 24-72 hours at 37° C. This incubation time is flexible. The ratio of silencing will remain consistent at any point in the time period. Assay for gene silencing using an appropriate detection method such as RT-PCR, Western blot analysis, immunohistochemistry, phenotypic analysis, mass spectrometry, fluorescence, radioactive decay, or any other method that is now known or that comes to be known to persons skilled in the art and that from reading this disclosure would useful with the present invention. The optimal window for observing a knockdown phenotype is related to the mRNA turnover of the gene of interest, although 24-72 hours is standard. Final Volume reflects amount needed in each well for the desired cell culture format. When adjusting volumes for a Stock Mix, an additional 10% should be used to accommodate variability in pipetting, elc. Duplicate or triplicate assays should be carried out when possible.

### Example XVII

### SiRNAs That Target Kinases

[0432] siRNAs that target nucleotide sequences for kinases with the NCBI accession numbers denoted below and having sequences generated iii silico by the algorithms herein, are provided. In various embodiments, the siRNAs are rationally designed. In various embodiments, the siRNAs are functional or hyperfunctional. These siRNA that have been generated by the algorithms of the present invention include:

LENGTHY TABLE REFERENCED HERE
US20080097092A1-20080424-T00001
Please refer to the end of the specification for access instructions.

[0433] Thus, consistent with Example XVII, the present invention provides an siRNA that targets a nucleotide sequence for a kinase, wherein the siRNA is selected from the group consisting of SEQ. ID NOs. 438-22603.

[0434] In another embodiment, an siRNA is provided, said siRNA comprising a sense region and an antisense region, wherein said sense region and said antisense region are at least 90% complementary, said sense region and said antisense region together form a duplex region comprising 18-30 base pairs, and said sense region comprises a sequence that is at least 90% similar to a sequence selected from the group consisting of: SEQ. ID NOs 438-22603.

[0435] In another embodiment, an siRNA is provided wherein the siRNA comprises a sense region and an antisense region, wherein said sense region and said antisense region are at least 90% complementary, said sense region and said antisense region together form a duplex region comprising 18-30 base pairs, and said sense region comprises a sequence that is identical to a contiguous stretch of at least 18 bases of a sequence selected from the group consisting of: SEQ. ID NOs 438-22603.

[0436] In another embodiment, an siRNA is provided wherein the siRNA comprises a sense region and an antisense region, wherein said sense region and said antisense region are at least 90% complementary, said sense region and said antisense region together form a duplex region comprising 19-30 base pairs, and said sense region comprises a sequence that is identical to a contiguous stretch of at least 18 bases of a sequence selected from the group consisting of: SEQ. ID NOs 438-22603.

[0437] In another embodiment, a pool of at least two siRNAs is provided, wherein said pool comprises a first siRNA and a second siRNA, said first siRNA comprises a duplex region of length 18-30 base pairs that has a first sense region that is at least 90% similar to 18 bases of a first sequence selected from the group consisting of: SEQ. ID NOs 438-22603 and said second siRNA comprises a duplex region of length 18-30 base pairs that has a second sense region that is at least 90% similar to 18 bases of a second sequence selected from the group consisting of: SEQ. ID NOs 438-22603 and wherein said first sense region and said second sense region are not identical.

[0438] In another embodiment, a pool of at least two siRNAs is provided, wherein said pool comprises a first siRNA and a second siRNA, said first siRNA comprises a duplex region of length 18-30 base pairs that has a first sense region that is identical to at least 18 bases of a sequence selected from the group consisting of: SEQ. ID NOs 438-22603 and wherein the second siRNA comprises a second sense region that comprises a sequence that is identical to at least 18 bases of a sequence selected from the group consisting of: SEQ. ID NOs 438-22603.

[0439] In another embodiment, a pool of at least two siRNAs is provided, wherein said pool comprises a first siRNA and a second siRNA, said first siRNA comprises a duplex region of length 19-30 base pairs and has a first sense region comprising a sequence that is at least 90% similar to a sequence selected from the group consisting of: SEQ. ID NOs 438-22603, and said duplex of said second siRNA is 19-30 base pairs and comprises a second sense region that comprises a sequence that is at least 90% similar to a sequence selected from the group consisting of: SEQ. ID NOs 438-22603.

[0440] In another embodiment, a pool of at least two siRNAs is provided, wherein said pool comprises a first siRNA and a second siRNA, said first siRNA comprises a duplex region of length 19-30 base pairs and has a first sense region comprising a sequence that is identical to at least 18 bases of a sequence selected the group consisting of: SEQ. ID NOs 438-22603 and said duplex of said second siRNA is 19-30 base pairs and comprises a second sense region comprising a sequence that is identical to a sequence selected from the group consisting of: SEQ. ID NOs 438-22603.

[0441] In each of the aforementioned embodiments, preferably the antisense region is at least 90% complementary to a contiguous stretch of bases of one of the NCBI sequences identified in Example XVII; each of the recited NCBI sequences is incorporated by reference as if set forth fully herein. In some embodiments, the antisense region is 100% complementary to a contiguous stretch of bases of one of the NCBI sequences identified in Example XVII.

[0442] Further, in some embodiments that are directed to siRNA duplexes in which the antisense region is 20-30 bases in length, preferably there is a stretch of 19 bases that is at least 90%, more preferably 100% complementary to the recited sequence id number and the entire antisense region is at least 90% and more preferably 100% complementary to a contiguous stretch of bases of one of the NCBI sequences identified in Example XVII.

[0443] While the invention has been described in connection with specific embodiments thereof, it will be understood that it is capable of further modifications and this application is intended to cover any variations, uses, or adaptations of the invention following, in general, the principles of the invention and including such departure from the present disclosure as come within known or customary practice within the art to which the invention pertains and as may be applied to the essential features hereinbefore set forth and as follows in the scope of the appended claims.

LENGTHY TABLE
The patent application contains a lengthy table section. A copy of the table is available in electronic form from the USPTO web site (http://seqdata.uspto.gov/?pageRequest=docDetail&DocID=US20080097092A1). An electronic copy of the table will also be available from the USPTO upon request and payment of the fee set forth in 37 CFR 1.19(b)(3).

The application's sequence listing, which the Patent Office published only in electronic form, follows.

SEQUENCE LISTING (22603 sequences)

SEQ ID NO: 1 - RNA, 19 nt, Artificial Sequence
  Synthetic
  misc_feature 1-2, 4, 6-9, 12, 15-18: n is any nucleotide
nnanannnnucnaannnna

SEQ ID NO: 2 - RNA, 19 nt, Artificial Sequence
  Synthetic
  misc_feature 1-2, 4, 6-9, 12, 15-18: n is any nucleotide
nnanannnnugnaannnna

SEQ ID NO: 3 - RNA, 19 nt, Artificial Sequence
  Synthetic
  misc_feature 1-2, 4, 6-9, 12, 15-18: n is any nucleotide
nnanannnnuunaannnna

SEQ ID NO: 4 - RNA, 19 nt, Artificial Sequence
  Synthetic
  misc_feature 1-2, 4, 6-9, 12, 15-18: n is any nucleotide
nnanannnnucncannnna

SEQ ID NO: 5 - RNA, 19 nt, Artificial Sequence
  Synthetic
  misc_feature 1-2, 4, 6-9, 12, 15-18: n is any nucleotide
nnanannnnugncannnna

SEQ ID NO: 6 - RNA, 19 nt, Artificial Sequence
  Synthetic
  misc_feature 1-2, 4, 6-9, 12, 15-18: n is any nucleotide
nnanannnnuuncannnna

SEQ ID NO: 7 - RNA, 19 nt, Artificial Sequence
  Synthetic
  misc_feature 1-2, 4, 6-9, 12, 15-18: n is any nucleotide
nnanannnnucnuannnna

SEQ ID NO: 8 - RNA, 19 nt, Artificial Sequence
  Synthetic
  misc_feature 1-2, 4, 6-9, 12, 15-18: n is any nucleotide
nnanannnnugnuannnna

SEQ ID NO: 9 - RNA, 19 nt, Artificial Sequence
  Synthetic
  misc_feature 1-2, 4, 6-9, 12, 15-18: n is any nucleotide
nnanannnnuunuannnna

SEQ ID NO: 10 - RNA, 19 nt, Artificial Sequence
  Synthetic
  misc_feature 1-2, 4, 6-9, 12, 15-18: n is any nucleotide
nnancnnnnucnaannnna

SEQ ID NO: 11 - RNA, 19 nt, Artificial Sequence
  Synthetic
  misc_feature 1-2, 4, 6-9, 12, 15-18: n is any nucleotide
nnancnnnnugnaannnna

SEQ ID NO: 12 - RNA, 19 nt, Artificial Sequence
  Synthetic
  misc_feature 1-2, 4, 6-9, 12, 15-18: n is any nucleotide
nnancnnnnuunaannnna

SEQ ID NO: 13 - RNA, 19 nt, Artificial Sequence
  Synthetic
  misc_feature 1-2, 4, 6-9, 12, 15-18: n is any nucleotide
nnancnnnnucncannnna

SEQ ID NO: 14 - RNA, 19 nt, Artificial Sequence
  Synthetic
  misc_feature 1-2, 4, 6-9, 12, 15-18: n is any nucleotide
nnancnnnnugncannnna

SEQ ID NO: 15 - RNA, 19 nt, Artificial Sequence
  Synthetic
  misc_feature 1-2, 4, 6-9, 12, 15-18: n is any nucleotide
nnancnnnnuuncannnna

SEQ ID NO: 16 - RNA, 19 nt, Artificial Sequence
  Synthetic
  misc_feature 1-2, 4, 6-9, 12, 15-18: n is any nucleotide
nnancnnnnucnuannnna

SEQ ID NO: 17 - RNA, 19 nt, Artificial Sequence
  Synthetic
  misc_feature 1-2, 4, 6-9, 12, 15-18: n is any nucleotide
nnancnnnnugnuannnna

SEQ ID NO: 18 - RNA, 19 nt, Artificial Sequence
  Synthetic
  misc_feature 1-2, 4, 6-9, 12, 15-18: n is any nucleotide
nnancnnnnuunuannnna

SEQ ID NO: 19 - RNA, 19 nt, Artificial Sequence
  Synthetic
  misc_feature 1-2, 4, 6-9, 12, 15-18: n is any nucleotide
nnangnnnnucnaannnna

SEQ ID NO: 20 - RNA, 19 nt, Artificial Sequence
  Synthetic
  misc_feature 1-2, 4, 6-9, 12, 15-18: n is any nucleotide
nnangnnnnugnaannnna

SEQ ID NO: 21 - RNA, 19 nt, Artificial Sequence
  Synthetic
  misc_feature 1-2, 4, 6-9, 12, 15-18: n is any nucleotide
nnangnnnnuunaannnna

SEQ ID NO: 22 - RNA, 19 nt, Artificial Sequence
  Synthetic
  misc_feature 1-2, 4, 6-9, 12, 15-18: n is any nucleotide
nnangnnnnucncannnna

SEQ ID NO: 23 - RNA, 19 nt, Artificial Sequence
  Synthetic
  misc_feature 1-2, 4, 6-9, 12, 15-18: n is any nucleotide
nnangnnnnugncannnna

SEQ ID NO: 24 - RNA, 19 nt, Artificial Sequence
  Synthetic
  misc_feature 1-2, 4, 6-9, 12, 15-18: n is any nucleotide
nnangnnnnuuncannnna

SEQ ID NO: 25 - RNA, 19 nt, Artificial Sequence
  Synthetic
  misc_feature 1-2, 4, 6-9, 12, 15-18: n is any nucleotide
nnangnnnnucnuannnna

SEQ ID NO: 26 - RNA, 19 nt, Artificial Sequence
  Synthetic
  misc_feature 1-2, 4, 6-9, 12, 15-18: n is any nucleotide
nnangnnnnugnuannnna

SEQ ID NO: 27 - RNA, 19 nt, Artificial Sequence
  Synthetic
  misc_feature 1-2, 4, 6-9, 12, 15-18: n is any nucleotide
nnangnnnnuunuannnna

SEQ ID NO: 28 - RNA, 22 nt, Artificial Sequence
  Synthetic
  misc_feature 4-5,7,9-12,15,18-21: n is any nucleotide
gucnnanannnnucnaannnna

SEQ ID NO: 29 - DNA, 208 bp, Homo sapiens
  misc_feature (1)...(208): human cyclophilin fragment
gttccaaaaacagtggataattttgtggccttagctacaggagagaaaggatttggctacaaaaacagcaaattccatcgtgtaatcaaggacttcatgatccagggcggagacttcaccaggggagatggcacaggaggaaagagcatctacggtgagcgcttccccgatgagaacttcaaactgaagcactacgggcctggctggg

SEQ ID NO: 30 - DNA, 200 bp, Photinus pyralis
  misc_feature (1)...(200): firefly luciferase fragment
tgaacttcccgccgccgttgttgttttggagcacggaaagacgatgacggaaaaagagatcgtggattacgtcgccagtcaagtaacaaccgcgaaaaagttgcgcggaggagttgtgtttgtggacgaagtaccgaaaggtcttaccggaaaactcgacgcaagaaaaatcagagagatcctcataaaggccaagaagg

SEQ ID NO: 31 - DNA, 108 bp, Homo sapiens
  misc_feature (1)...(108): human DBL fragment
acgggcaaggccaagtgggatgcctggaatgagctgaaagggacttccaaggaagatgccatgaaagcttacatcaacaaagtagaagagctaaagaaaaaatacggg

SEQ ID NO: 32 - RNA, 19 nt, Artificial Sequence
  Synthetic
guuccaaaaacaguggaua

SEQ ID NO: 33 - RNA, 19 nt, Artificial Sequence
  Synthetic
cccaaaaacaguggauaau

SEQ ID NO: 34 - RNA, 19 nt, Artificial Sequence
  Synthetic
caaaaacaguggauaauuu

SEQ ID NO: 35 - RNA, 19 nt, Artificial Sequence
  Synthetic
aaaacaguggauaauuuug

SEQ ID NO: 36 - RNA, 19 nt, Artificial Sequence
  Synthetic
aacaguggauaauuuugug

SEQ ID NO: 37 - RNA, 19 nt, Artificial Sequence
  Synthetic
caguggauaauuuuguggc

SEQ ID NO: 38 - RNA, 19 nt, Artificial Sequence
  Synthetic
guggauaauuuuguggccu

SEQ ID NO: 39 - RNA, 19 nt, Artificial Sequence
  Synthetic
ggauaauuuuguggccuua

SEQ ID NO: 40 - RNA, 19 nt, Artificial Sequence
  Synthetic
auaauuuuguggccuuagc

SEQ ID NO: 41 - RNA, 19 nt, Artificial Sequence
  Synthetic
aauuuuguggccuuagcua

SEQ ID NO: 42 - RNA, 19 nt, Artificial Sequence
  Synthetic
uuuuguggccuuagcuaca

SEQ ID NO: 43 - RNA, 19 nt, Artificial Sequence
  Synthetic
uuguggccuuagcuacagg

SEQ ID NO: 44 - RNA, 19 nt, Artificial Sequence
  Synthetic
guggccuuagcuacaggag

SEQ ID NO: 45 - RNA, 19 nt, Artificial Sequence
  Synthetic
ggccuuagcuacaggagag

SEQ ID NO: 46 - RNA, 19 nt, Artificial Sequence
  Synthetic
ccuuagcuacaggagagaa

SEQ ID NO: 47 - RNA, 19 nt, Artificial Sequence
  Synthetic
uuagcuacaggagagaaag

SEQ ID NO: 48 - RNA, 19 nt, Artificial Sequence
  Synthetic
agcuacaggagagaaagga

SEQ ID NO: 49 - RNA, 19 nt, Artificial Sequence
  Synthetic
cuacaggagagaaaggauu

SEQ ID NO: 50 - RNA, 19 nt, Artificial Sequence
  Synthetic
acaggagagaaaggauuug

SEQ ID NO: 51 - RNA, 19 nt, Artificial Sequence
  Synthetic
aggagagaaaggauuuggc

SEQ ID NO: 52 - RNA, 19 nt, Artificial Sequence
  Synthetic
gagagaaaggauuuggcua

SEQ ID NO: 53 - RNA, 19 nt, Artificial Sequence
  Synthetic
gagaaaggauuuggcuaca

SEQ ID NO: 54 - RNA, 19 nt, Artificial Sequence
  Synthetic
gaaaggauuuggcuacaaa

SEQ ID NO: 55 - RNA, 19 nt, Artificial Sequence
  Synthetic
aaggauuuggcuacaaaaa

SEQ ID NO: 56 - RNA, 19 nt, Artificial Sequence
  Synthetic
ggauuuggcuacaaaaaca

SEQ ID NO: 57 - RNA, 19 nt, Artificial Sequence
  Synthetic
auuuggcuacaaaaacagc

SEQ ID NO: 58 - RNA, 19 nt, Artificial Sequence
  Synthetic
uuggcuacaaaaacagcaa

SEQ ID NO: 59 - RNA, 19 nt, Artificial Sequence
  Synthetic
ggcuacaaaaacagcaaau

SEQ ID NO: 60 - RNA, 19 nt, Artificial Sequence
  Synthetic
cuacaaaaacagcaaauuc

SEQ ID NO: 61 - RNA, 19 nt, Artificial Sequence
  Synthetic
acaaaaacagcaaauucca

SEQ ID NO: 62 - RNA, 19 nt, Artificial Sequence
  Synthetic
aaaaacagcaaauuccauc

SEQ ID NO: 63 - RNA, 19 nt, Artificial Sequence
  Synthetic
aaacagcaaauuccaucgu

SEQ ID NO: 64 - RNA, 19 nt, Artificial Sequence
  Synthetic
acagcaaauuccaucgugu

SEQ ID NO: 65 - RNA, 19 nt, Artificial Sequence
  Synthetic
agcaaauuccaucguguaa

SEQ ID NO: 66 - RNA, 19 nt, Artificial Sequence
  Synthetic
caaauuccaucguguaauc

SEQ ID NO: 67 - RNA, 19 nt, Artificial Sequence
  Synthetic
aauuccaucguguaaucaa

SEQ ID NO: 68 - RNA, 19 nt, Artificial Sequence
  Synthetic
uuccaucguguaaucaagg

SEQ ID NO: 69 - RNA, 19 nt, Artificial Sequence
  Synthetic
ccaucguguaaucaaggac

SEQ ID NO: 70 - RNA, 19 nt, Artificial Sequence
  Synthetic
aucguguaaucaaggacuu

SEQ ID NO: 71 - RNA, 19 nt, Artificial Sequence
  Synthetic
cguguaaucaaggacuuca

SEQ ID NO: 72 - RNA, 19 nt, Artificial Sequence
  Synthetic
uguaaucaaggacuucaug

SEQ ID NO: 73 - RNA, 19 nt, Artificial Sequence
  Synthetic
uaaucaaggacuucaugau

SEQ ID NO: 74 - RNA, 19 nt, Artificial Sequence
  Synthetic
aucaaggacuucaugaucc

SEQ ID NO: 75 - RNA, 19 nt, Artificial Sequence
  Synthetic
caaggacuucaugauccag

SEQ ID NO: 76 - RNA, 19 nt, Artificial Sequence
  Synthetic
aggacuucaugauccaggg

SEQ ID NO: 77 - RNA, 19 nt, Artificial Sequence
  Synthetic
gacuucaugauccagggcg

SEQ ID NO: 78 - RNA, 19 nt, Artificial Sequence
  Synthetic
cuucaugauccagggcgga

SEQ ID NO: 79 - RNA, 19 nt, Artificial Sequence
  Synthetic
ucaugauccagggcggaga

SEQ ID NO: 80 - RNA, 19 nt, Artificial Sequence
  Synthetic
augauccagggcggagacu

SEQ ID NO: 81 - RNA, 19 nt, Artificial Sequence
  Synthetic
gauccagggcggagacuuc

SEQ ID NO: 82 - RNA, 19 nt, Artificial Sequence
  Synthetic
uccagggcggagacuucac

SEQ ID NO: 83 - RNA, 19 nt, Artificial Sequence
  Synthetic
cagggcggagacuucacca

SEQ ID NO: 84 - RNA, 19 nt, Artificial Sequence
  Synthetic
gggcggagacuucaccagg

SEQ ID NO: 85 - RNA, 19 nt, Artificial Sequence
  Synthetic
gcggagacuucaccagggg

SEQ ID NO: 86 - RNA, 19 nt, Artificial Sequence
  Synthetic
ggagacuucaccaggggag

SEQ ID NO: 87 - RNA, 19 nt, Artificial Sequence
  Synthetic
agacuucaccaggggagau

SEQ ID NO: 88 - RNA, 19 nt, Artificial Sequence
  Synthetic
acuucaccaggggagaugg

SEQ ID NO: 89 - RNA, 19 nt, Artificial Sequence
  Synthetic
uucaccaggggagauggca

SEQ ID NO: 90 - RNA, 19 nt, Artificial Sequence
  Synthetic
caccaggggagauggcaca

SEQ ID NO: 91 - RNA, 19 nt, Artificial Sequence
  Synthetic
ccaggggagauggcacagg

SEQ ID NO: 92 - RNA, 19 nt, Artificial Sequence
  Synthetic
aggggagauggcacaggag

SEQ ID NO: 93 - RNA, 19 nt, Artificial Sequence
  Synthetic
gggagauggcacaggagga

SEQ ID NO: 94 - RNA, 19 nt, Artificial Sequence
  Synthetic
gagauggcacaggaggaaa

SEQ ID NO: 95 - RNA, 19 nt, Artificial Sequence
  Synthetic
gauggcacaggaggaaaga

SEQ ID NO: 96 - RNA, 19 nt, Artificial Sequence
  Synthetic
uggcacaggaggaaagagc

SEQ ID NO: 97 - RNA, 19 nt, Artificial Sequence
  Synthetic
gcacaggaggaaagagcau

SEQ ID NO: 98 - RNA, 19 nt, Artificial Sequence
  Synthetic
acaggaggaaagagcaucu

SEQ ID NO: 99 - RNA, 19 nt, Artificial Sequence
  Synthetic
aggaggaaagagcaucuac

SEQ ID NO: 100 - RNA, 19 nt, Artificial Sequence
  Synthetic
gaggaaagagcaucuacgg

SEQ ID NO: 101 - RNA, 19 nt, Artificial Sequence
  Synthetic
ggaaagagcaucuacggug

SEQ ID NO: 102 - RNA, 19 nt, Artificial Sequence
  Synthetic
aaagagcaucuacggugag

SEQ ID NO: 103 - RNA, 19 nt, Artificial Sequence
  Synthetic
agagcaucuacggugagcg

SEQ ID NO: 104 - RNA, 19 nt, Artificial Sequence
  Synthetic
agcaucuacggugagcgcu

SEQ ID NO: 105 - RNA, 19 nt, Artificial Sequence
  Synthetic
caucuacggugagcgcuuc

SEQ ID NO: 106 - RNA, 19 nt, Artificial Sequence
  Synthetic
ucuacggugagcgcuuccc

SEQ ID NO: 107 - RNA, 19 nt, Artificial Sequence
  Synthetic
uacggugagcgcuuccccg

SEQ ID NO: 108 - RNA, 19 nt, Artificial Sequence
  Synthetic
cggugagcgcuuccccgau

SEQ ID NO: 109 - RNA, 19 nt, Artificial Sequence
  Synthetic
gugagcgcuuccccgauga

SEQ ID NO: 110 - RNA, 19 nt, Artificial Sequence
  Synthetic
gagcgcuuccccgaugaga

SEQ ID NO: 111 - RNA, 19 nt, Artificial Sequence
  Synthetic
gcgcuuccccgaugagaac

SEQ ID NO: 112 - RNA, 19 nt, Artificial Sequence
  Synthetic
gcuuccccgaugagaacuu

SEQ ID NO: 113 - RNA, 19 nt, Artificial Sequence
  Synthetic
uuccccgaugagaacuuca

SEQ ID NO: 114 - RNA, 19 nt, Artificial Sequence
  Synthetic
ccccgaugagaacuucaaa

SEQ ID NO: 115 - RNA, 19 nt, Artificial Sequence
  Synthetic
ccgaugagaacuucaaacu

SEQ ID NO: 116 - RNA, 19 nt, Artificial Sequence
  Synthetic
gaugagaacuucaaacuga

SEQ ID NO: 117 - RNA, 19 nt, Artificial Sequence
  Synthetic
ugagaacuucaaacugaag

SEQ ID NO: 118 - RNA, 19 nt, Artificial Sequence
  Synthetic
agaacuucaaacugaagca

SEQ ID NO: 119 - RNA, 19 nt, Artificial Sequence
  Synthetic
aacuucaaacugaagcacu

SEQ ID NO: 120 - RNA, 19 nt, Artificial Sequence
  Synthetic
cuucaaacugaagcacuac

SEQ ID NO: 121 - RNA, 19 nt, Artificial Sequence
  Synthetic
ucaaacugaagcacuacgg

SEQ ID NO: 122 - RNA, 19 nt, Artificial Sequence
  Synthetic
acgggcaaggccaaguggg

SEQ ID NO: 123 - RNA, 19 nt, Artificial Sequence
  Synthetic
cgggcaaggccaaguggga

SEQ ID NO: 124 - RNA, 19 nt, Artificial Sequence
  Synthetic
gggcaaggccaagugggau

SEQ ID NO: 125 - RNA, 19 nt, Artificial Sequence
  Synthetic
ggcaaggccaagugggaug

SEQ ID NO: 126 - RNA, 19 nt, Artificial Sequence
  Synthetic
gcaaggccaagugggaugc

SEQ ID NO: 127 - RNA, 19 nt, Artificial Sequence
  Synthetic
caaggccaagugggaugcc

SEQ ID NO: 128 - RNA, 19 nt, Artificial Sequence
  Synthetic
aaggccaagugggaugccu

SEQ ID NO: 129 - RNA, 19 nt, Artificial Sequence
  Synthetic
aggccaagugggaugccug

SEQ ID NO: 130 - RNA, 19 nt, Artificial Sequence
  Synthetic
ggccaagugggaugccugg

SEQ ID NO: 131 - RNA, 19 nt, Artificial Sequence
  Synthetic
gccaagugggaugccugga

SEQ ID NO: 132 - RNA, 19 nt, Artificial Sequence
  Synthetic
ccaagugggaugccuggaa

SEQ ID NO: 133 - RNA, 19 nt, Artificial Sequence
  Synthetic
caagugggaugccuggaau

SEQ ID NO: 134 - RNA, 19 nt, Artificial Sequence
  Synthetic
aagugggaugccuggaaug

SEQ ID NO: 135 - RNA, 19 nt, Artificial Sequence
  Synthetic
agugggaugccuggaauga

SEQ ID NO: 136 - RNA, 19 nt, Artificial Sequence
  Synthetic
gugggaugccuggaaugag

SEQ ID NO: 137 - RNA, 19 nt, Artificial Sequence
  Synthetic
ugggaugccuggaaugagc

SEQ ID NO: 138 - RNA, 19 nt, Artificial Sequence
  Synthetic
gggaugccuggaaugagcu

SEQ ID NO: 139 - RNA, 19 nt, Artificial Sequence
  Synthetic
ggaugccuggaaugagcug

SEQ ID NO: 140 - RNA, 19 nt, Artificial Sequence
  Synthetic
gaugccuggaaugagcuga

SEQ ID NO: 141 - RNA, 19 nt, Artificial Sequence
  Synthetic
augccuggaaugagcugaa

SEQ ID NO: 142 - RNA, 19 nt, Artificial Sequence
  Synthetic
ugccuggaaugagcugaaa

SEQ ID NO: 143 - RNA, 19 nt, Artificial Sequence
  Synthetic
gccuggaaugagcugaaag

SEQ ID NO: 144 - RNA, 19 nt, Artificial Sequence
  Synthetic
ccuggaaugagcugaaagg

SEQ ID NO: 145 - RNA, 19 nt, Artificial Sequence
  Synthetic
cuggaaugagcugaaaggg

SEQ ID NO: 146 - RNA, 19 nt, Artificial Sequence
  Synthetic
uggaaugagcugaaaggga

SEQ ID NO: 147 - RNA, 19 nt, Artificial Sequence
  Synthetic
ggaaugagcugaaagggac

SEQ ID NO: 148 - RNA, 19 nt, Artificial Sequence
  Synthetic
gaaugagcugaaagggacu

SEQ ID NO: 149 - RNA, 19 nt, Artificial Sequence
  Synthetic
aaugagcugaaagggacuu

SEQ ID NO: 150 - RNA, 19 nt, Artificial Sequence
  Synthetic
augagcugaaagggacuuc

SEQ ID NO: 151 - RNA, 19 nt, Artificial Sequence
  Synthetic
ugagcugaaagggacuucc

SEQ ID NO: 152 - RNA, 19 nt, Artificial Sequence
  Synthetic
gagcugaaagggacuucca

SEQ ID NO: 153 - RNA, 19 nt, Artificial Sequence
  Synthetic
agcugaaagggacuuccaa

SEQ ID NO: 154 - RNA, 19 nt, Artificial Sequence
  Synthetic
gcugaaagggacuuccaag

SEQ ID NO: 155 - RNA, 19 nt, Artificial Sequence
  Synthetic
cugaaagggacuuccaagg

SEQ ID NO: 156 - RNA, 19 nt, Artificial Sequence
  Synthetic
ugaaagggacuuccaagga

SEQ ID NO: 157 - RNA, 19 nt, Artificial Sequence
  Synthetic
gaaagggacuuccaaggaa

SEQ ID NO: 158 - RNA, 19 nt, Artificial Sequence
  Synthetic
aaagggacuuccaaggaag

SEQ ID NO: 159 - RNA, 19 nt, Artificial Sequence
  Synthetic
aagggacuuccaaggaaga

SEQ ID NO: 160 - RNA, 19 nt, Artificial Sequence
  Synthetic
agggacuuccaaggaagau

SEQ ID NO: 161 - RNA, 19 nt, Artificial Sequence
  Synthetic
gggacuuccaaggaagaug

SEQ ID NO: 162 - RNA, 19 nt, Artificial Sequence
  Synthetic
ggacuuccaaggaagaugc

SEQ ID NO: 163 - RNA, 19 nt, Artificial Sequence
  Synthetic
gacuuccaaggaagaugcc

SEQ ID NO: 164 - RNA, 19 nt, Artificial Sequence
  Synthetic
acuuccaaggaagaugcca

SEQ ID NO: 165 - RNA, 19 nt, Artificial Sequence
  Synthetic
cuuccaaggaagaugccau

SEQ ID NO: 166 - RNA, 19 nt, Artificial Sequence
  Synthetic
uuccaaggaagaugccaug

SEQ ID NO: 167 - RNA, 19 nt, Artificial Sequence
  Synthetic
uccaaggaagaugccauga

SEQ ID NO: 168 - RNA, 19 nt, Artificial Sequence
  Synthetic
ccaaggaagaugccaugaa

SEQ ID NO: 169 - RNA, 19 nt, Artificial Sequence
  Synthetic
caaggaagaugccaugaaa

SEQ ID NO: 170 - RNA, 19 nt, Artificial Sequence
  Synthetic
aaggaagaugccaugaaag

SEQ ID NO: 171 - RNA, 19 nt, Artificial Sequence
  Synthetic
aggaagaugccaugaaagc

SEQ ID NO: 172 - RNA, 19 nt, Artificial Sequence
  Synthetic
ggaagaugccaugaaagcu

SEQ ID NO: 173 - RNA, 19 nt, Artificial Sequence
  Synthetic
gaagaugccaugaaagcuu

SEQ ID NO: 174 - RNA, 19 nt, Artificial Sequence
  Synthetic
aagaugccaugaaagcuua

SEQ ID NO: 175 - RNA, 19 nt, Artificial Sequence
  Synthetic
agaugccaugaaagcuuac

SEQ ID NO: 176 - RNA, 19 nt, Artificial Sequence
  Synthetic
gaugccaugaaagcuuaca

SEQ ID NO: 177 - RNA, 19 nt, Artificial Sequence
  Synthetic
augccaugaaagcuuacau

SEQ ID NO: 178 - RNA, 19 nt, Artificial Sequence
  Synthetic
ugccaugaaagcuuacauc

SEQ ID NO: 179 - RNA, 19 nt, Artificial Sequence
  Synthetic
gccaugaaagcuuacauca

SEQ ID NO: 180 - RNA, 19 nt, Artificial Sequence
  Synthetic
ccaugaaagcuuacaucaa

SEQ ID NO: 181 - RNA, 19 nt, Artificial Sequence
  Synthetic
caugaaagcuuacaucaac

SEQ ID NO: 182 - RNA, 19 nt, Artificial Sequence
  Synthetic
augaaagcuuacaucaaca

SEQ ID NO: 183 - RNA, 19 nt, Artificial Sequence
  Synthetic
ugaaagcuuacaucaacaa

SEQ ID NO: 184 - RNA, 19 nt, Artificial Sequence
  Synthetic
gaaagcuuacaucaacaaa

SEQ ID NO: 185 - RNA, 19 nt, Artificial Sequence
  Synthetic
aaagcuuacaucaacaaag

SEQ ID NO: 186 - RNA, 19 nt, Artificial Sequence
  Synthetic
aagcuuacaucaacaaagu

SEQ ID NO: 187 - RNA, 19 nt, Artificial Sequence
  Synthetic
agcuuacaucaacaaagua

SEQ ID NO: 188 - RNA, 19 nt, Artificial Sequence
  Synthetic
agcuuacaucacaaaguag

SEQ ID NO: 189 - RNA, 19 nt, Artificial Sequence
  Synthetic
cuuacaucaacaaaguaga

SEQ ID NO: 190 - RNA, 19 nt, Artificial Sequence
  Synthetic
uuacaucaacaaaguagaa

SEQ ID NO: 191 - RNA, 19 nt, Artificial Sequence
  Synthetic
uacaucaacaaaguagaag

SEQ ID NO: 192 - RNA, 19 nt, Artificial Sequence
  Synthetic
acaucaacaaaguagaaga

SEQ ID NO: 193 - RNA, 19 nt, Artificial Sequence
  Synthetic
caucaacaaaguagaagag

SEQ ID NO: 194 - RNA, 19 nt, Artificial Sequence
  Synthetic
aucaacaaaguagaagagc

SEQ ID NO: 195 - RNA, 19 nt, Artificial Sequence
  Synthetic
ucaacaaaguagaagagcu

SEQ ID NO: 196 - RNA, 19 nt, Artificial Sequence
  Synthetic
caacaaaguagaagagcua

SEQ ID NO: 197 - RNA, 19 nt, Artificial Sequence
  Synthetic
aacaaaguagaagagcuaa

SEQ ID NO: 198 - RNA, 19 nt, Artificial Sequence
  Synthetic
acaaaguagaagagcuaaa

SEQ ID NO: 199 - RNA, 19 nt, Artificial Sequence
  Synthetic
caaaguagaagagcuaaag

SEQ ID NO: 200 - RNA, 19 nt, Artificial Sequence
  Synthetic
aaaguagaagagcuaaaga

SEQ ID NO: 201 - RNA, 19 nt, Artificial Sequence
  Synthetic
aaguagaagagcuaaagaa

SEQ ID NO: 202 - RNA, 19 nt, Artificial Sequence
  Synthetic
aguagaagagcuaaagaaa

SEQ ID NO: 203 - RNA, 19 nt, Artificial Sequence
  Synthetic
guagaagagcuaaagaaaa

SEQ ID NO: 204 - RNA, 19 nt, Artificial Sequence
  Synthetic
uagaagagcuaaagaaaaa

SEQ ID NO: 205 - RNA, 19 nt, Artificial Sequence
  Synthetic
agaagagcuaaagaaaaaa

SEQ ID NO: 206 - RNA, 19 nt, Artificial Sequence
  Synthetic
gaagagcuaaagaaaaaau

SEQ ID NO: 207 - RNA, 19 nt, Artificial Sequence
  Synthetic
aagagcuaaagaaaaaaua

SEQ ID NO: 208 - RNA, 19 nt, Artificial Sequence
  Synthetic
agagcuaaagaaaaaauac

SEQ ID NO: 209 - RNA, 19 nt, Artificial Sequence
  Synthetic
gagcuaaagaaaaaauacg

SEQ ID NO: 210 - RNA, 19 nt, Artificial Sequence
  Synthetic
agcuaaagaaaaaauacgg

SEQ ID NO: 211 - RNA, 19 nt, Artificial Sequence
  Synthetic
gcuaaagaaaaaauacggg

SEQ ID NO: 212 - RNA, 19 nt, Artificial Sequence
  Synthetic
auccucauaaaggccaaga

SEQ ID NO: 213 - RNA, 19 nt, Artificial Sequence
  Synthetic
agauccucauaaaggccaa

SEQ ID NO: 214 - RNA, 19 nt, Artificial Sequence
  Synthetic
agagauccucauaaaggcc

SEQ ID NO: 215 - RNA, 19 nt, Artificial Sequence
  Synthetic
agagagauccucauaaagg

SEQ ID NO: 216 - RNA, 19 nt, Artificial Sequence
  Synthetic
ucagagagauccucauaaa

SEQ ID NO: 217 - RNA, 19 nt, Artificial Sequence
  Synthetic
aaucagagagauccucaua

SEQ ID NO: 218 - RNA, 19 nt, Artificial Sequence
  Synthetic
aaaaucagagagauccuca

SEQ ID NO: 219 - RNA, 19 nt, Artificial Sequence
  Synthetic
gaaaaaucagagagauccu

SEQ ID NO: 220 - RNA, 19 nt, Artificial Sequence
  Synthetic
aagaaaaaucagagagauc

SEQ ID NO: 221 - RNA, 19 nt, Artificial Sequence
  Synthetic
gcaagaaaaaucagagaga

SEQ ID NO: 222 - RNA, 19 nt, Artificial Sequence
  Synthetic
acgcaagaaaaaucagaga

SEQ ID NO: 223 - RNA, 19 nt, Artificial Sequence
  Synthetic
cgacgcaagaaaaaucaga

SEQ ID NO: 224 - RNA, 19 nt, Artificial Sequence
  Synthetic
cucgacgcaagaaaaauca

SEQ ID NO: 225 - RNA, 19 nt, Artificial Sequence
  Synthetic
aacucgacgcaagaaaaau

SEQ ID NO: 226 - RNA, 19 nt, Artificial Sequence
  Synthetic
aaaacucgacgcaagaaaa

SEQ ID NO: 227 - RNA, 19 nt, Artificial Sequence
  Synthetic
ggaaaacucgacgcaagaa

SEQ ID NO: 228 - RNA, 19 nt, Artificial Sequence
  Synthetic
ccggaaaacucgacgcaag

SEQ ID NO: 229 - RNA, 19 nt, Artificial Sequence
  Synthetic
uaccggaaaacucgacgca

SEQ ID NO: 230 - RNA, 19 nt, Artificial Sequence
  Synthetic
cuuaccggaaaacucgacg

SEQ ID NO: 231 - RNA, 19 nt, Artificial Sequence
  Synthetic
gucuuaccggaaaacucga

SEQ ID NO: 232 - RNA, 19 nt, Artificial Sequence
  Synthetic
aggucuuaccggaaaacuc

SEQ ID NO: 233 - RNA, 19 nt, Artificial Sequence
  Synthetic
aaaggucuuaccggaaaac

SEQ ID NO: 234 - RNA, 19 nt, Artificial Sequence
  Synthetic
cgaaaggucuuaccggaaa

SEQ ID NO: 235 - RNA, 19 nt, Artificial Sequence
  Synthetic
accgaaaggucuuaccgga

SEQ ID NO: 236 - RNA, 19 nt, Artificial Sequence
  Synthetic
guaccgaaaggucuuaccg

SEQ ID NO: 237 - RNA, 19 nt, Artificial Sequence
  Synthetic
aaguaccgaaaggucuuac

SEQ ID NO: 238 - RNA, 19 nt, Artificial Sequence
  Synthetic
cgaaguaccgaaaggucuu

SEQ ID NO: 239 - RNA, 19 nt, Artificial Sequence
  Synthetic
gacgaaguaccgaaagguc

SEQ ID NO: 240 - RNA, 19 nt, Artificial Sequence
  Synthetic
uggacgaaguaccgaaagg

SEQ ID NO: 241 - RNA, 19 nt, Artificial Sequence
  Synthetic
uguggacgaaguaccgaaa

SEQ ID NO: 242 - RNA, 19 nt, Artificial Sequence
  Synthetic
uuuguggacgaaguaccga

SEQ ID NO: 243 - RNA, 19 nt, Artificial Sequence
  Synthetic
uguuuguggacgaaguacc

SEQ ID NO: 244 - RNA, 19 nt, Artificial Sequence
  Synthetic
uguguuuguggacgaagua

SEQ ID NO: 245 - RNA, 19 nt, Artificial Sequence
  Synthetic
guuguguuuguggacgaag

SEQ ID NO: 246 - RNA, 19 nt, Artificial Sequence
  Synthetic
gaguuguguuuguggacga

SEQ ID NO: 247 - RNA, 19 nt, Artificial Sequence
  Synthetic
aggaguuguguuuguggac

SEQ ID NO: 248 - RNA, 19 nt, Artificial Sequence
  Synthetic
ggaggaguuguguuugugg

SEQ ID NO: 249 - RNA, 19 nt, Artificial Sequence
  Synthetic
gcggaggaguuguguuugu

SEQ ID NO: 250 - RNA, 19 nt, Artificial Sequence
  Synthetic
gcgcggaggaguuguguuu

SEQ ID NO: 251 - RNA, 19 nt, Artificial Sequence
  Synthetic
uugcgcggaggaguugugu

SEQ ID NO: 252 - RNA, 19 nt, Artificial Sequence
  Synthetic
aguugcgcggaggaguugu

SEQ ID NO: 253 - RNA, 19 nt, Artificial Sequence
  Synthetic
aaaguugcgcggaggaguu

SEQ ID NO: 254 - RNA, 19 nt, Artificial Sequence
  Synthetic
aaaaaguugcgcggaggag

SEQ ID NO: 255 - RNA, 19 nt, Artificial Sequence
  Synthetic
cgaaaaaguugcgcggagg

SEQ ID NO: 256 - RNA, 19 nt, Artificial Sequence
  Synthetic
cgcgaaaaaguugcgcgga

SEQ ID NO: 257 - RNA, 19 nt, Artificial Sequence
  Synthetic
accgcgaaaaaguugcgcg

SEQ ID NO: 258 - RNA, 19 nt, Artificial Sequence
  Synthetic
caaccgcgaaaaaguugcg

SEQ ID NO: 259 - RNA, 19 nt, Artificial Sequence
  Synthetic
aacaaccgcgaaaaaguug

SEQ ID NO: 260 - RNA, 19 nt, Artificial Sequence
  Synthetic
guaacaaccgcgaaaaagu

SEQ ID NO: 261 - RNA, 19 nt, Artificial Sequence
  Synthetic
aaguaacaaccgcgaaaaa

SEQ ID NO: 262 - RNA, 19 nt, Artificial Sequence
  Synthetic
ucaaguaacaaccgcgaaa

SEQ ID NO: 263 - RNA, 19 nt, Artificial Sequence
  Synthetic
agucaaguaacaaccgcga

SEQ ID NO: 264 - RNA, 19 nt, Artificial Sequence
  Synthetic
ccagucaaguaacaaccgc

SEQ ID NO: 265 - RNA, 19 nt, Artificial Sequence
  Synthetic
cgccagucaaguaacaacc

SEQ ID NO: 266 - RNA, 19 nt, Artificial Sequence
  Synthetic
gucgccagucaaguaacaa

SEQ ID NO: 267 - RNA, 19 nt, Artificial Sequence
  Synthetic
acgucgccagucaaguaac

SEQ ID NO: 268 - RNA, 19 nt, Artificial Sequence
  Synthetic
uuacgucgccagucaagua

SEQ ID NO: 269 - RNA, 19 nt, Artificial Sequence
  Synthetic
gauuacgucgccagucaag

SEQ ID NO: 270 - RNA, 19 nt, Artificial Sequence
  Synthetic
uggauuacgucgccaguca

SEQ ID NO: 271 - RNA, 19 nt, Artificial Sequence
  Synthetic
cguggauuacgucgccagu

SEQ ID NO: 272 - RNA, 19 nt, Artificial Sequence
  Synthetic
aucguggauuacgucgcca

SEQ ID NO: 273 - RNA, 19 nt, Artificial Sequence
  Synthetic
agaucguggauuacgucgc

SEQ ID NO: 274 - RNA, 19 nt, Artificial Sequence
  Synthetic
agagaucguggauuacguc

SEQ ID NO: 275 - RNA, 19 nt, Artificial Sequence
  Synthetic
aaagagaucguggauuacg

SEQ ID NO: 276 - RNA, 19 nt, Artificial Sequence
  Synthetic
aaaaagagaucguggauua

SEQ ID NO: 277 - RNA, 18 nt, Artificial Sequence
  Synthetic
gaaaaagagaucguggau

SEQ ID NO: 278 - RNA, 19 nt, Artificial Sequence
  Synthetic
acggaaaaagagaucgugg

SEQ ID NO: 279 - RNA, 19 nt, Artificial Sequence
  Synthetic
ugacggaaaaagagaucgu

SEQ ID NO: 280 - RNA, 19 nt, Artificial Sequence
  Synthetic
gaugacggaaaaagagauc

SEQ ID NO: 281 - RNA, 19 nt, Artificial Sequence
  Synthetic
acgaugacggaaaaagaga

SEQ ID NO: 282 - RNA, 19 nt, Artificial Sequence
  Synthetic
agacgaugacggaaaaaga

SEQ ID NO: 283 - RNA, 19 nt, Artificial Sequence
  Synthetic
aaagacgaugacggaaaaa

SEQ ID NO: 284 - RNA, 19 nt, Artificial Sequence
  Synthetic
ggaaagacgaugacggaaa

SEQ ID NO: 285 - RNA, 19 nt, Artificial Sequence
  Synthetic
acggaaagacgaugacgga

SEQ ID NO: 286 - RNA, 19 nt, Artificial Sequence
  Synthetic
gcacggaaagacgaugacg

SEQ ID NO: 287 - RNA, 19 nt, Artificial Sequence
  Synthetic
gagcacggaaagacgauga

SEQ ID NO: 288 - RNA, 19 nt, Artificial Sequence
  Synthetic
uggagcacggaaagacgau

SEQ ID NO: 289 - RNA, 19 nt, Artificial Sequence
  Synthetic
uuuggagcacggaaagacg

SEQ ID NO: 290 - RNA, 19 nt, Artificial Sequence
  Synthetic
guuuuggagcacggaaaga

SEQ ID NO: 291 - RNA, 19 nt, Artificial Sequence
  Synthetic
uuguuuuggagcacggaaa

SEQ ID NO: 292 - RNA, 19 nt, Artificial Sequence
  Synthetic
uguuguuuuggagcacgga

SEQ ID NO: 293 - RNA, 19 nt, Artificial Sequence
  Synthetic
guuguuguuuuggagcacg

SEQ ID NO: 294 - RNA, 19 nt, Artificial Sequence
  Synthetic
ccguuguuguuuuggagca

SEQ ID NO: 295 - RNA, 19 nt, Artificial Sequence
  Synthetic
cgccguuguuguuuuggag

SEQ ID NO: 296 - RNA, 19 nt, Artificial Sequence
  Synthetic
gccgccguuguuguuuugg

SEQ ID NO: 297 - RNA, 19 nt, Artificial Sequence
  Synthetic
ccgccgccguuguuguuuu

SEQ ID NO: 298 - RNA, 19 nt, Artificial Sequence
  Synthetic
ucccgccgccguuguuguu

SEQ ID NO: 299 - RNA, 19 nt, Artificial Sequence
  Synthetic
cuucccgccgccguuguug

SEQ ID NO: 300 - RNA, 19 nt, Artificial Sequence
  Synthetic
aacuucccgccgccguugu

SEQ ID NO: 301 - RNA, 19 nt, Artificial Sequence
  Synthetic
ugaacuucccgccgccguu

SEQ ID NO: 302 - RNA, 19 nt, Artificial Sequence
  Synthetic
gggagauagugaugaagua

SEQ ID NO: 303 - RNA, 19 nt, Artificial Sequence
  Synthetic
gaaguacauccauuauaag

SEQ ID NO: 304 - RNA, 19 nt, Artificial Sequence
  Synthetic
guacgacaaccgggagaua

SEQ ID NO: 305 - RNA, 19 nt, Artificial Sequence
  Synthetic
agauagugaugaaguacau

SEQ ID NO: 306 - RNA, 19 nt, Artificial Sequence
  Synthetic
ugaagacucugcucaguuu

SEQ ID NO: 307 - RNA, 19 nt, Artificial Sequence
  Synthetic
gcaugcggccucuguuuga

SEQ ID NO: 308 - RNA, 19 nt, Artificial Sequence
  Synthetic
ugcggccucuguuugauuu

SEQ ID NO: 309 - RNA, 19 nt, Artificial Sequence
  Synthetic
gagauagugaugaaguaca

SEQ ID NO: 310 - RNA, 19 nt, Artificial Sequence
  Synthetic
ggagauagugaugaaguac

SEQ ID NO: 311 - RNA, 19 nt, Artificial Sequence
  Synthetic
gaagacucugcucaguuug

SEQ ID NO: 312 - DNA, 19 bp, Artificial Sequence
  Synthetic
gaaagaatctgtagagaaa

SEQ ID NO: 313 - DNA, 19 bp, Artificial Sequence
  Synthetic
gcaatgagctgtttgaaga

SEQ ID NO: 314 - DNA, 19 bp, Artificial Sequence
  Synthetic
tgacaaaggtggataaatt

SEQ ID NO: 315 - DNA, 19 bp, Artificial Sequence
  Synthetic
ggaaatggatctctttgaa

SEQ ID NO: 316 - DNA, 19 bp, Artificial Sequence
  Synthetic
ggaaagtaatggtccaaca

SEQ ID NO: 317 - DNA, 19 bp, Artificial Sequence
  Synthetic
agacagttatgcagctatt

SEQ ID NO: 318 - DNA, 19 bp, Artificial Sequence
  Synthetic
ccaattctcggaagcaaga

SEQ ID NO: 319 - DNA, 19 bp, Artificial Sequence
  Synthetic
gaaagtaatggtccaacag

SEQ ID NO: 320 - DNA, 19 bp, Artificial Sequence
  Synthetic
gcgccagagtgaacaagta

SEQ ID NO: 321 - DNA, 19 bp, Artificial Sequence
  Synthetic
gaaggtggcccagctatgt

SEQ ID NO: 322 - DNA, 19 bp, Artificial Sequence
  Synthetic
ggaaccagcgccagagtga

SEQ ID NO: 323 - DNA, 19 bp, Artificial Sequence
  Synthetic
gagcgagattgcaggcata

SEQ ID NO: 324 - DNA, 19 bp, Artificial Sequence
  Synthetic
gttagtatctgatgacttg

SEQ ID NO: 325 - DNA, 19 bp, Artificial Sequence
  Synthetic
gaaatggaaccactaagaa

SEQ ID NO: 326 - DNA, 19 bp, Artificial Sequence
  Synthetic
ggaaatggaaccactaaga

SEQ ID NO: 327 - DNA, 19 bp, Artificial Sequence
  Synthetic
caactacactttccaatgc

SEQ ID NO: 328 - DNA, 19 bp, Artificial Sequence
  Synthetic
ccaccaagatttcatgata

SEQ ID NO: 329 - DNA, 19 bp, Artificial Sequence
  Synthetic
gatcggaactccaacaaga

SEQ ID NO: 330 - DNA, 19 bp, Artificial Sequence
  Synthetic
aaacggagctacagattat

SEQ ID NO: 331 - DNA, 19 bp, Artificial Sequence
  Synthetic
ccacacagcattcttgtaa

SEQ ID NO: 332 - DNA, 19 bp, Artificial Sequence
  Synthetic
gaagttaccttgagcaatc

SEQ ID NO: 333 - DNA, 19 bp, Artificial Sequence
  Synthetic
ggacttggccgatccagaa

SEQ ID NO: 334 - DNA, 19 bp, Artificial Sequence
  Synthetic
gcacttggatcgagatgag

SEQ ID NO: 335 - DNA, 19 bp, Artificial Sequence
  Synthetic
caaagaccaattcgcgtta

SEQ ID NO: 336 - DNA, 19 bp, Artificial Sequence
  Synthetic
ccgaatcaatcgcatcttc

SEQ ID NO: 337 - DNA, 19 bp, Artificial Sequence
  Synthetic
gacatgatcctgcagttca

SEQ ID NO: 338 - DNA, 19 bp, Artificial Sequence
  Synthetic
gagcgaatcgtcaccactt

SEQ ID NO: 339 - DNA, 19 bp, Artificial Sequence
  Synthetic
cctccgagctggcgtctac

SEQ ID NO: 340 - DNA, 19 bp, Artificial Sequence
  Synthetic
tcacatggttaacctctaa

SEQ ID NO: 341 - DNA, 19 bp, Artificial Sequence
  Synthetic
gatgagggacgccataatc

SEQ ID NO: 342 - DNA, 19 bp, Artificial Sequence
  Synthetic
cctctaactacaaatctta

SEQ ID NO: 343 - DNA, 19 bp, Artificial Sequence
  Synthetic
ggaaggtgctatccaaaat

SEQ ID NO: 344 - DNA, 19 bp, Artificial Sequence
  Synthetic
gcaagcaagtcctaacatt

SEQ ID NO: 345 - DNA, 19 bp, Artificial Sequence
  Synthetic
ggaagaggagtagacctta

SEQ ID NO: 346 - DNA, 19 bp, Artificial Sequence
  Synthetic
aggaatcagtgttgtagta

SEQ ID NO: 347 - DNA, 19 bp, Artificial Sequence
  Synthetic
gaagaggagtagaccttac

SEQ ID NO: 348 - DNA, 19 bp, Artificial Sequence
  Synthetic
gaaagtcaagcctggtatt

SEQ ID NO: 349 - DNA, 19 bp, Artificial Sequence
  Synthetic
aaagtcaagcctggtatta

SEQ ID NO: 350 - DNA, 19 bp, Artificial Sequence
  Synthetic
gctatgaacgtgaatgatc

SEQ ID NO: 351 - DNA, 19 bp, Artificial Sequence
  Synthetic
caagcctggtattacgttt

SEQ ID NO: 352 - DNA, 19 bp, Artificial Sequence
  Synthetic
ggaacaagatctgtcaatt

SEQ ID NO: 353 - DNA, 19 bp, Artificial Sequence
  Synthetic
gcaatgaacgtgaacgaaa

SEQ ID NO: 354 - DNA, 19 bp, Artificial Sequence
  Synthetic
caatgaacgtgaacgaaat

SEQ ID NO: 355 - DNA, 19 bp, Artificial Sequence
  Synthetic
ggacaggagcggtatcaca

SEQ ID NO: 356 - DNA, 19 bp, Artificial Sequence
  Synthetic
agacagagcttgagaataa

SEQ ID NO: 357 - DNA, 19 bp, Artificial Sequence
  Synthetic
gagaagatctttatgcaaa

SEQ ID NO: 358 - DNA, 19 bp, Artificial Sequence
  Synthetic
gaagagaaatcagcagata

SEQ ID NO: 359 - DNA, 19 bp, Artificial Sequence
  Synthetic
gcaagtaactcaactaaca

SEQ ID NO: 360 - DNA, 19 bp, Artificial Sequence
  Synthetic
gagctaatctgccacattg

SEQ ID NO: 361 - DNA, 19 bp, Artificial Sequence
  Synthetic
gcagatgagttactagaaa

SEQ ID NO: 362 - DNA, 19 bp, Artificial Sequence
  Synthetic
caacttaattgtccagaaa

SEQ ID NO: 363 - DNA, 19 bp, Artificial Sequence
  Synthetic
caacacaggattctgataa

SEQ ID NO: 364 - DNA, 19 bp, Artificial Sequence
  Synthetic
agattgtgcctaagtctct

SEQ ID NO: 365 - DNA, 19 bp, Artificial Sequence
  Synthetic
atgaagatctggaggtgaa

SEQ ID NO: 366 - DNA, 19 bp, Artificial Sequence
  Synthetic
tttgagacttcttgcctaa

SEQ ID NO: 367 - DNA, 19 bp, Artificial Sequence
  Synthetic
agatcaccctccttaaata

SEQ ID NO: 368 - DNA, 19 bp, Artificial Sequence
  Synthetic
caacggatttggtcgtatt

SEQ ID NO: 369 - DNA, 19 bp, Artificial Sequence
  Synthetic
gaaatcccatcaccatctt

SEQ ID NO: 370 - DNA, 19 bp, Artificial Sequence
  Synthetic
gacctcaactacatggttt

SEQ ID NO: 371 - DNA, 19 bp, Artificial Sequence
  Synthetic
tggtttacatgttccaata

SEQ ID NO: 372 - DNA, 19 bp, Artificial Sequence
  Synthetic
gaagaaatcgatgttgttt

SEQ ID NO: 373 - DNA, 19 bp, Artificial Sequence
  Synthetic
acacaaacttgaacagcta

SEQ ID NO: 374 - DNA, 19 bp, Artificial Sequence
  Synthetic
ggaagaaatcgatgttgtt

SEQ ID NO: 375 - DNA, 19 bp, Artificial Sequence
  Synthetic
gaaacgacgagaacagttg

SEQ ID NO: 376 - DNA, 19 bp, Artificial Sequence
  Synthetic
gcacatggatggaggttct

SEQ ID NO: 377 - DNA, 19 bp, Artificial Sequence
  Synthetic
gcagagagagcagatttga

SEQ ID NO: 378 - DNA, 19 bp, Artificial Sequence
  Synthetic
gaggttctctggatcaagt

SEQ ID NO: 379 - DNA, 19 bp, Artificial Sequence
  Synthetic
gagcagatttgaagcaact

SEQ ID NO: 380 - DNA, 19 bp, Artificial Sequence
  Synthetic
caaagacgatgacttcgaa

SEQ ID NO: 381 - DNA, 19 bp, Artificial Sequence
  Synthetic
gatcagcatttgcatggaa

SEQ ID NO: 382 - DNA, 19 bp, Artificial Sequence
  Synthetic
tccaggagtttgtcaataa

SEQ ID NO: 383 - DNA, 19 bp, Artificial Sequence
  Synthetic
ggaagctgatccaccttga

SEQ ID NO: 384 - DNA, 19 bp, Artificial Sequence
  Synthetic
gcagaaatctaaggatata

SEQ ID NO: 385 - DNA, 19 bp, Artificial Sequence
  Synthetic
caacaaggatgaagtctat

SEQ ID NO: 386 - DNA, 19 bp, Artificial Sequence
  Synthetic
cagcagaaatctaaggata

SEQ ID NO: 387 - DNA, 19 bp, Artificial Sequence
  Synthetic
ctagatggctttctcagta

SEQ ID NO: 388 - DNA, 19 bp, Artificial Sequence
  Synthetic
agacaaggtcccaaagaca

SEQ ID NO: 389 - DNA, 19 bp, Artificial Sequence
  Synthetic
ggaatggcaagaccagcaa

SEQ ID NO: 390 - DNA, 19 bp, Artificial Sequence
  Synthetic
agaattattccagggttta

SEQ ID NO: 391 - DNA, 19 bp, Artificial Sequence
  Synthetic
gcagacaaggtcccaaaga

SEQ ID NO: 392 - DNA, 19 bp, Artificial Sequence
  Synthetic
agaagcagcttcaggatga

SEQ ID NO: 393 - DNA, 19 bp, Artificial Sequence
  Synthetic
gagcttgacttccagaaga

SEQ ID NO: 394 - DNA, 19 bp, Artificial Sequence
  Synthetic
ccaccgaagttcaccctaa

SEQ ID NO: 395 - DNA, 19 bp, Artificial Sequence
  Synthetic
gagaagagctcctccatca

SEQ ID NO: 396 - DNA, 19 bp, Artificial Sequence
  Synthetic
gaaagagcatctacggtga

SEQ ID NO: 397 - DNA, 19 bp, Artificial Sequence
  Synthetic
gaaaggatttggctacaaa

SEQ ID NO: 398 - DNA, 19 bp, Artificial Sequence
  Synthetic
acagcaaattccatcgtgt

SEQ ID NO: 399 - DNA, 19 bp, Artificial Sequence
  Synthetic
ggaaagactgttccaaaaa

SEQ ID NO: 400 - DNA, 19 bp, Artificial Sequence
  Synthetic
caacacgcctcatcctcta

SEQ ID NO: 401 - DNA, 19 bp, Artificial Sequence
  Synthetic
catgaaagcttacatcaac

SEQ ID NO: 402 - DNA, 19 bp, Artificial Sequence
  Synthetic
aagatgccatgaaagctta

SEQ ID NO: 403 - DNA, 19 bp, Artificial Sequence
  Synthetic
gcacataccgcctgagtct

SEQ ID NO: 404 - DNA, 19 bp, Artificial Sequence
  Synthetic
gatcaaatctgaagaagga

SEQ ID NO: 405 - DNA, 19 bp, Artificial Sequence
  Synthetic
gccaagaagtttcctaata

SEQ ID NO: 406 - DNA, 19 bp, Artificial Sequence
  Synthetic
cagcatatcttgaaccatt

SEQ ID NO: 407 - DNA, 19 bp, Artificial Sequence
  Synthetic
gaacaaaggaaacggatga

SEQ ID NO: 408 - DNA, 19 bp, Artificial Sequence
  Synthetic
cggaaacggtccaggctat

SEQ ID NO: 409 - DNA, 19 bp, Artificial Sequence
  Synthetic
gcttcgagcagacatgata

SEQ ID NO: 410 - DNA, 19 bp, Artificial Sequence
  Synthetic
cctacacggtcctcctata

SEQ ID NO: 411 - DNA, 19 bp, Artificial Sequence
  Synthetic
gccaagaacctcatcatct

SEQ ID NO: 412 - DNA, 19 bp, Artificial Sequence
  Synthetic
gatatgggctgaatacaaa

SEQ ID NO: 413 - DNA, 19 bp, Artificial Sequence
  Synthetic
gcactctgattgacaaata

SEQ ID NO: 414 - DNA, 19 bp, Artificial Sequence
  Synthetic
tgaagtctctgattaagta

SEQ ID NO: 415 - DNA, 19 bp, Artificial Sequence
  Synthetic
tcagagagatcctcataaa

SEQ ID NO: 416 - DNA, 19 bp, Artificial Sequence
  Synthetic
gcaagaagatcaccatttc

SEQ ID NO: 417 - DNA, 19 bp, Artificial Sequence
  Synthetic
gagagaaatttgaggatga

SEQ ID NO: 418 - DNA, 19 bp, Artificial Sequence
  Synthetic
gaaaggatttggctataag

SEQ ID NO: 419 - DNA, 19 bp, Artificial Sequence
  Synthetic
gaaagaaggcatgaacatt

SEQ ID NO: 420 - DNA, 19 bp, Artificial Sequence
  Synthetic
gggagatagtgatgaagta

SEQ ID NO: 421 - DNA, 19 bp, Artificial Sequence
  Synthetic
gaagtacatccattataag

SEQ ID NO: 422 - DNA, 19 bp, Artificial Sequence
  Synthetic
gtacgacaaccgggagata

SEQ ID NO: 423 - DNA, 19 bp, Artificial Sequence
  Synthetic
agatagtgatgaagtacat

SEQ ID NO: 424 - DNA, 19 bp, Artificial Sequence
  Synthetic
tgaagactctgctcagttt

SEQ ID NO: 425 - DNA, 19 bp, Artificial Sequence
  Synthetic
gcatgcggcctctgtttga

SEQ ID NO: 426 - RNA, 19 nt, Artificial Sequence
  Synthetic
gcacacagcuuacuacauc

SEQ ID NO: 427 - RNA, 19 nt, Artificial Sequence
  Synthetic
gaaaugcccugguaucuca

SEQ ID NO: 428 - RNA, 19 nt, Artificial Sequence
  Synthetic
gaaggaacgugaugugauc

SEQ ID NO: 429 - RNA, 19 nt, Artificial Sequence
  Synthetic
gcacuacuccuguguguga

SEQ ID NO: 430 - RNA, 19 nt, Artificial Sequence
  Synthetic
gaacccagcuggagaacuu

SEQ ID NO: 431 - RNA, 19 nt, Artificial Sequence
  Synthetic
gauauacagugugaucuua

SEQ ID NO: 432 - RNA, 19 nt, Artificial Sequence
  Synthetic
guacuacgauccugauuau

SEQ ID NO: 433 - RNA, 19 nt, Artificial Sequence
  Synthetic
gugccgaccuuuacaauuu

SEQ ID NO: 434 - DNA, 19 bp, Artificial Sequence
  Synthetic
gaaggaaactgaattcaaa

SEQ ID NO: 435 - DNA, 19 bp, Artificial Sequence
  Synthetic
ggaaatatgtactacgaaa

SEQ ID NO: 436 - DNA, 19 bp, Artificial Sequence
  Synthetic
ccacaaagcagtgaattta

SEQ ID NO: 437 - DNA, 19 bp, Artificial Sequence
  Synthetic
gtaacaagctcacgcagtt

SEQ ID NO: 438 - RNA, 19 nt, Artificial Sequence
  Synthetic
caguagaagaugagauuaa

SEQ ID NO: 439 - RNA, 19 nt, Artificial Sequence
  Synthetic
cugaagaacugcuaaacaa

SEQ ID NO: 440 - RNA, 19 nt, Artificial Sequence
  Synthetic
agagagaaauccagauaau

SEQ ID NO: 441 - RNA, 19 nt, Artificial Sequence
  Synthetic
ggaggaauguggaaaguuu

SEQ ID NO: 442 - RNA, 19 nt, Artificial Sequence
  Synthetic
gggaaagucagguggcaau

SEQ ID NO: 443 - RNA, 19 nt, Artificial Sequence
  Synthetic
caggugugcaagagagaaa

SEQ ID NO: 444 - RNA, 19 nt, Artificial Sequence
  Synthetic
caguaagacaacagccaaa

SEQ ID NO: 445 - RNA, 19 nt, Artificial Sequence
  Synthetic
ggugaaaucugagaagaaa

SEQ ID NO: 446 - RNA, 19 nt, Artificial Sequence
  Synthetic
caaacaggcuuuacagaga

SEQ ID NO: 447 - RNA, 19 nt, Artificial Sequence
  Synthetic
ccugauaauucucgauauu

SEQ ID NO: 448 - RNA, 19 nt, Artificial Sequence
  Synthetic
augaagugcuccagauauu

SEQ ID NO: 449 - RNA, 19 nt, Artificial Sequence
  Synthetic
caagagagaaauccagaua

SEQ ID NO: 450 - RNA, 19 nt, Artificial Sequence
  Synthetic
ggaaccagacccugacaaa

SEQ ID NO: 451 - RNA, 19 nt, Artificial Sequence
  Synthetic
cauuuaagcuacucaagaa

SEQ ID NO: 452 - RNA, 19 nt, Artificial Sequence
  Synthetic
cgagaagcuuggaggcuca

SEQ ID NO: 453 - RNA, 19 nt, Artificial Sequence
  Synthetic
ggagauuucuagaguggau

SEQ ID NO: 454 - RNA, 19 nt, Artificial Sequence
  Synthetic
gaaugaagugcuccagaua

SEQ ID NO: 455 - RNA, 19 nt, Artificial Sequence
  Synthetic
gaugaaaugugccuugaaa

SEQ ID NO: 456 - RNA, 19 nt, Artificial Sequence
  Synthetic
agugaaagccagugaggca

SEQ ID NO: 457 - RNA, 19 nt, Artificial Sequence
  Synthetic
agucaaugcaguagaagau

SEQ ID NO: 458 - RNA, 19 nt, Artificial Sequence
  Synthetic
cagaaauggucaaccugua

SEQ ID NO: 459 - RNA, 19 nt, Artificial Sequence
  Synthetic
agagaaauccagauaauga

SEQ ID NO: 460 - RNA, 19 nt, Artificial Sequence
  Synthetic
cagcugaagaacugcuaaa

SEQ ID NO: 461 - RNA, 19 nt, Artificial Sequence
  Synthetic
cuucacaauuccugauaau

SEQ ID NO: 462 - RNA, 19 nt, Artificial Sequence
  Synthetic
acaaaaggccggauauuua

SEQ ID NO: 463 - RNA, 19 nt, Artificial Sequence
  Synthetic
cgugaguagcggugaugua

SEQ ID NO: 464 - RNA, 19 nt, Artificial Sequence
  Synthetic
uggcaauuugugauggaaa

SEQ ID NO: 465 - RNA, 19 nt, Artificial Sequence
  Synthetic
guuucaagaaugacaagua

SEQ ID NO: 466 - RNA, 19 nt, Artificial Sequence
  Synthetic
gcguauucucagugacgua

SEQ ID NO: 467 - RNA, 19 nt, Artificial Sequence
  Synthetic
gguauauguuggaaccaga

SEQ ID NO: 468 - RNA, 19 nt, Artificial Sequence
  Synthetic
agaaacagguggagaacaa

SEQ ID NO: 469 - RNA, 19 nt, Artificial Sequence
  Synthetic
cuaaaguggcucugagaaa

SEQ ID NO: 470 - RNA, 19 nt, Artificial Sequence
  Synthetic
caaacaggccgcugagaaa

SEQ ID NO: 471 - RNA, 19 nt, Artificial Sequence
  Synthetic
gcacaagaugccacagaaa

SEQ ID NO: 472 - RNA, 19 nt, Artificial Sequence
  Synthetic
ccauggagguagaagaauu

SEQ ID NO: 473 - RNA, 19 nt, Artificial Sequence
  Synthetic
ugaagaaacagguggagaa

SEQ ID NO: 474 - RNA, 19 nt, Artificial Sequence
  Synthetic
uggaagaaauacagccuua

SEQ ID NO: 475 - RNA, 19 nt, Artificial Sequence
  Synthetic
uagaagaauuccugaaaga

SEQ ID NO: 476 - RNA, 19 nt, Artificial Sequence
  Synthetic
cagcauuucugaagaggua

SEQ ID NO: 477 - RNA, 19 nt, Artificial Sequence
  Synthetic
ggaagaugccaaagagaca

SEQ ID NO: 478 - RNA, 19 nt, Artificial Sequence
  Synthetic
cugcaguaaugaaggaaau

SEQ ID NO: 479 - RNA, 19 nt, Artificial Sequence
  Synthetic
uggaguacuuagagaagaa

SEQ ID NO: 480 - RNA, 19 nt, Artificial Sequence
  Synthetic
ccucgaaagcaaagagaca

SEQ ID NO: 481 - RNA, 19 nt, Artificial Sequence
  Synthetic
gaaauggagcgaacagaua

SEQ ID NO: 482 - RNA, 19 nt, Artificial Sequence
  Synthetic
gugauguggugcagaggua

SEQ ID NO: 483 - RNA, 19 nt, Artificial Sequence
  Synthetic
aauacgaacucacggguaa

SEQ ID NO: 484 - RNA, 19 nt, Artificial Sequence
  Synthetic
ugucauguguacaggaaau

SEQ ID NO: 485 - RNA, 19 nt, Artificial Sequence
  Synthetic
gaaagaagcugcaguaaug

SEQ ID NO: 486 - RNA, 19 nt, Artificial Sequence
  Synthetic
gggguauuguugugggaaa

SEQ ID NO: 487 - RNA, 19 nt, Artificial Sequence
  Synthetic
gagcaggauaggauggcaa

SEQ ID NO: 488 - RNA, 19 nt, Artificial Sequence
  Synthetic
ggguauuguugugggaaau

SEQ ID NO: 489 - RNA, 19 nt, Artificial Sequence
  Synthetic
gcacaggccucuaguggau

SEQ ID NO: 490 - RNA, 19 nt, Artificial Sequence
  Synthetic
guaacugccuagugggaga

SEQ ID NO: 491 - RNA, 19 nt, Artificial Sequence
  Synthetic
gguagaagaauuccugaaa

SEQ ID NO: 492 - RNA, 19 nt, Artificial Sequence
  Synthetic
gcacagacucucaggggaa

SEQ ID NO: 493 - RNA, 19 nt, Artificial Sequence
  Synthetic
caguaaugaaggaaaucaa

SEQ ID NO: 494 - RNA, 19 nt, Artificial Sequence
  Synthetic
acgggaauuugcuggauua

SEQ ID NO: 495 - RNA, 19 nt, Artificial Sequence
  Synthetic
ccugaaagaagcugcagua

SEQ ID NO: 496 - RNA, 19 nt, Artificial Sequence
  Synthetic
ugaaagaagcugcaguaau

SEQ ID NO: 497 - RNA, 19 nt, Artificial Sequence
  Synthetic
ggacagcaccagagagucu

SEQ ID NO: 498 - RNA, 19 nt, Artificial Sequence
  Synthetic
agggaagggccgagaacua

SEQ ID NO: 499 - RNA, 19 nt, Artificial Sequence
  Synthetic
ggaggaaggccuugugcaa

SEQ ID NO: 500 - RNA, 19 nt, Artificial Sequence
  Synthetic
cauccuaccuggagcgcua

SEQ ID NO: 501 - RNA, 19 nt, Artificial Sequence
  Synthetic
acaaagugcuggagauguu

SEQ ID NO: 502 - RNA, 19 nt, Artificial Sequence
  Synthetic
agaaugaggaccuggagaa

SEQ ID NO: 503 - RNA, 19 nt, Artificial Sequence
  Synthetic
aguaagguguucaguggaa

SEQ ID NO: 504 - RNA, 19 nt, Artificial Sequence
  Synthetic
aaacgcaagucguggauga

SEQ ID NO: 505 - RNA, 19 nt, Artificial Sequence
  Synthetic
gcaagucguggaugaguaa

SEQ ID NO: 506 - RNA, 19 nt, Artificial Sequence
  Synthetic
acgaacuguaucugggaaa

SEQ ID NO: 507 - RNA, 19 nt, Artificial Sequence
  Synthetic
gccacaaagugcuggagau

SEQ ID NO: 508 - RNA, 19 nt, Artificial Sequence
  Synthetic
augaggaccuggagaagau

SEQ ID NO: 509 - RNA, 19 nt, Artificial Sequence
  Synthetic
gagcacuaccucagaauga

SEQ ID NO: 510 - RNA, 19 nt, Artificial Sequence
  Synthetic
cgggauggcaagaagguca

SEQ ID NO: 511 - RNA, 19 nt, Artificial Sequence
  Synthetic
ccuucaggacuuugaggaa

SEQ ID NO: 512 - RNA, 19 nt, Artificial Sequence
  Synthetic
ggggugacacugugggaaa

SEQ ID NO: 513 - RNA, 19 nt, Artificial Sequence
  Synthetic
gaaagcgacuggaggcuga

SEQ ID NO: 514 - RNA, 19 nt, Artificial Sequence
  Synthetic
gugacagacugggaggaaa

SEQ ID NO: 515 - RNA, 19 nt, Artificial Sequence
  Synthetic
ccuaugacccugugagcga

SEQ ID NO: 516 - RNA, 19 nt, Artificial Sequence
  Synthetic
uggcugagggcaugggcua

SEQ ID NO: 517 - RNA, 19 nt, Artificial Sequence
  Synthetic
ccagagaaauaaaguuagu

SEQ ID NO: 518 - RNA, 19 nt, Artificial Sequence
  Synthetic
ggugcgggcugucaggaaa

SEQ ID NO: 519 - RNA, 19 nt, Artificial Sequence
  Synthetic
cgcaagucguggaugagua

SEQ ID NO: 520 - RNA, 19 nt, Artificial Sequence
  Synthetic
gccuguggguggaguagua

SEQ ID NO: 521 - RNA, 19 nt, Artificial Sequence
  Synthetic
cagggaagacggugagugu

SEQ ID NO: 522 - RNA, 19 nt, Artificial Sequence
  Synthetic
cggacaagcugcacaucca

SEQ ID NO: 523 - RNA, 19 nt, Artificial Sequence
  Synthetic
uggagauguucgacuggaa

SEQ ID NO: 524 - RNA, 19 nt, Artificial Sequence
  Synthetic
cggacaggauugacgaacu

SEQ ID NO: 525 - RNA, 19 nt, Artificial Sequence
  Synthetic
gugaagaggaggaaggccu

SEQ ID NO: 526 - RNA, 19 nt, Artificial Sequence
  Synthetic
aggaaggccuugugcaaac

SEQ ID NO: 527 - RNA, 19 nt, Artificial Sequence
  Synthetic
ggugacagacugggaggaa

SEQ ID NO: 528 - RNA, 19 nt, Artificial Sequence
  Synthetic
ucaaggagguggugaauuu

SEQ ID NO: 529 - RNA, 19 nt, Artificial Sequence
  Synthetic
gguagggacuggaggaaca

SEQ ID NO: 530 - RNA, 19 nt, Artificial Sequence
  Synthetic
aagucaugguucagggaaa

SEQ ID NO: 531 - RNA, 19 nt, Artificial Sequence
  Synthetic
gugcauauguuaaagcuua

SEQ ID NO: 532 - RNA, 19 nt, Artificial Sequence
  Synthetic
agugagagcugcuggagaa

SEQ ID NO: 533 - RNA, 19 nt, Artificial Sequence
  Synthetic
uggccaagcuaaugaaaga

SEQ ID NO: 534 - RNA, 19 nt, Artificial Sequence
  Synthetic
gcauuaagucaguggcuuu

SEQ ID NO: 535 - RNA, 19 nt, Artificial Sequence
  Synthetic
ggaaagaugaccuguaaga

SEQ ID NO: 536 - RNA, 19 nt, Artificial Sequence
  Synthetic
agguuuaugagcagggaaa

SEQ ID NO: 537 - RNA, 19 nt, Artificial Sequence
  Synthetic
augguauaguggaggauua

SEQ ID NO: 538 - RNA, 19 nt, Artificial Sequence
  Synthetic
gggaaacggaauuguacaa

SEQ ID NO: 539 - RNA, 19 nt, Artificial Sequence
  Synthetic
aaagaaugcugguaucaaa

SEQ ID NO: 540 - RNA, 19 nt, Artificial Sequence
  Synthetic
cgauuuagaagcaaagauu

SEQ ID NO: 541 - RNA, 19 nt, Artificial Sequence
  Synthetic
guccauagcuaguggucuu

SEQ ID NO: 542 - RNA, 19 nt, Artificial Sequence
  Synthetic
acauuugcacauagagaua

SEQ ID NO: 543 - RNA, 19 nt, Artificial Sequence
  Synthetic
augagaagcccaaggucaa

SEQ ID NO: 544 - RNA, 19 nt, Artificial Sequence
  Synthetic
agggaaagaugaccuguaa

SEQ ID NO: 545 - RNA, 19 nt, Artificial Sequence
  Synthetic
uagcagauuuauuggauca

SEQ ID NO: 546 - RNA, 19 nt, Artificial Sequence
  Synthetic
guuuugaagauaugaggaa

SEQ ID NO: 547 - RNA, 19 nt, Artificial Sequence
  Synthetic
ugauaauucccucgacaaa

SEQ ID NO: 548 - RNA, 19 nt, Artificial Sequence
  Synthetic
gaugagaagcccaagguca

SEQ ID NO: 549 - RNA, 19 nt, Artificial Sequence
  Synthetic
aagcaaagauuucaguaga

SEQ ID NO: 550 - RNA, 19 nt, Artificial Sequence
  Synthetic
gcacauuugcacauagaga

SEQ ID NO: 551 - RNA, 19 nt, Artificial Sequence
  Synthetic
ucaacaaaggccaaacaua

SEQ ID NO: 552 - RNA, 19 nt, Artificial Sequence
  Synthetic
guauaguggaggauuacaa

SEQ ID NO: 553 - RNA, 19 nt, Artificial Sequence
  Synthetic
guuggagugugucgggaaa

SEQ ID NO: 554 - RNA, 19 nt, Artificial Sequence
  Synthetic
gggaaaauguugccgugaa

SEQ ID NO: 555 - RNA, 19 nt, Artificial Sequence
  Synthetic
ugaccaagagccugcauua

SEQ ID NO: 556 - RNA, 19 nt, Artificial Sequence
  Synthetic
gcaaagauuucaguagaau

SEQ ID NO: 557 - RNA, 19 nt, Artificial Sequence
  Synthetic
guauguguguagacuguaa

SEQ ID NO: 558 - RNA, 19 nt, Artificial Sequence
  Synthetic
ucagagaguucgagacaaa

SEQ ID NO: 559 - RNA, 19 nt, Artificial Sequence
  Synthetic
aggaagacgugaagaucua

SEQ ID NO: 560 - RNA, 19 nt, Artificial Sequence
  Synthetic
caucaaagguguggaggua

SEQ ID NO: 561 - RNA, 19 nt, Artificial Sequence
  Synthetic
guucagggaagcagagaua

SEQ ID NO: 562 - RNA, 19 nt, Artificial Sequence
  Synthetic
gggaucaguuuguugaaua

SEQ ID NO: 563 - RNA, 19 nt, Artificial Sequence
  Synthetic
ugaauagcguuguguguua

SEQ ID NO: 564 - RNA, 19 nt, Artificial Sequence
  Synthetic
ucagggaagcagagauaua

SEQ ID NO: 565 - RNA, 19 nt, Artificial Sequence
  Synthetic
gaggaguccaugaagaaua

SEQ ID NO: 566 - RNA, 19 nt, Artificial Sequence
  Synthetic
gggcuuguauauugggaga

SEQ ID NO: 567 - RNA, 19 nt, Artificial Sequence
  Synthetic
gagcgaauuguguggagaa

SEQ ID NO: 568 - RNA, 19 nt, Artificial Sequence
  Synthetic
gggaagaugaugcgagagu

SEQ ID NO: 569 - RNA, 19 nt, Artificial Sequence
  Synthetic
cgguggagcugguaggcau

SEQ ID NO: 570 - RNA, 19 nt, Artificial Sequence
  Synthetic
gcucagagaguucgagaca

SEQ ID NO: 571 - RNA, 19 nt, Artificial Sequence
  Synthetic
cguuuaagguugccaucaa

SEQ ID NO: 572 - RNA, 19 nt, Artificial Sequence
  Synthetic
gcgaaagguuguaugugau

SEQ ID NO: 573 - RNA, 19 nt, Artificial Sequence
  Synthetic
aagaauaucagcugccaua

SEQ ID NO: 574 - RNA, 19 nt, Artificial Sequence
  Synthetic
uggcagaguuaugagguaa

SEQ ID NO: 575 - RNA, 19 nt, Artificial Sequence
  Synthetic
guggcagaguuaugaggua

SEQ ID NO: 576 - RNA, 19 nt, Artificial Sequence
  Synthetic
gagauauaccagacgguca

SEQ ID NO: 577 - RNA, 19 nt, Artificial Sequence
  Synthetic
gcugcugacaauaaagaua

SEQ ID NO: 578 - RNA, 19 nt, Artificial Sequence
  Synthetic
gcgcauagcacgggauuca

SEQ ID NO: 579 - RNA, 19 nt, Artificial Sequence
  Synthetic
gaagaugaugcgagagugu

SEQ ID NO: 580 - RNA, 19 nt, Artificial Sequence
  Synthetic
ggccuggugugguggcaua

SEQ ID NO: 581 - RNA, 19 nt, Artificial Sequence
  Synthetic
gcuuguauauugggagauu

SEQ ID NO: 582 - RNA, 19 nt, Artificial Sequence
  Synthetic
uacaagagauuauuggcaa

SEQ ID NO: 583 - RNA, 19 nt, Artificial Sequence
  Synthetic
caacuacacgugugagaca

SEQ ID NO: 584 - RNA, 19 nt, Artificial Sequence
  Synthetic
cugcugacaauaaagauaa

SEQ ID NO: 585 - RNA, 19 nt, Artificial Sequence
  Synthetic
cugaaguacuugaugaaac

SEQ ID NO: 586 - RNA, 19 nt, Artificial Sequence
  Synthetic
cguuguauauugggagauu

SEQ ID NO: 587 - RNA, 19 nt, Artificial Sequence
  Synthetic
gagccugaaucaucguuua

SEQ ID NO: 588 - RNA, 19 nt, Artificial Sequence
  Synthetic
cgauagaggaaaugagaaa

SEQ ID NO: 589 - RNA, 19 nt, Artificial Sequence
  Synthetic
gaggaauuguugaggagua

SEQ ID NO: 590 - RNA, 19 nt, Artificial Sequence
  Synthetic
caacaaagauaauggaacu

SEQ ID NO: 591 - RNA, 19 nt, Artificial Sequence
  Synthetic
cgauugugcuucaggaaau

SEQ ID NO: 592 - RNA, 19 nt, Artificial Sequence
  Synthetic
gcucaagucuucugucaua

SEQ ID NO: 593 - RNA, 19 nt, Artificial Sequence
  Synthetic
ccuccagagaugaaagaua

SEQ ID NO: 594 - RNA, 19 nt, Artificial Sequence
  Synthetic
gugggaaccaagagguaua

SEQ ID NO: 595 - RNA, 19 nt, Artificial Sequence
  Synthetic
ggaagauguggcugugaaa

SEQ ID NO: 596 - RNA, 19 nt, Artificial Sequence
  Synthetic
gagaauaaugcgugagugu

SEQ ID NO: 597 - RNA, 19 nt, Artificial Sequence
  Synthetic
ggucugguuuacugggaaa

SEQ ID NO: 598 - RNA, 19 nt, Artificial Sequence
  Synthetic
guucaaaggacaauugcaa

SEQ ID NO: 599 - RNA, 19 nt, Artificial Sequence
  Synthetic
gggaagauguggcugugaa

SEQ ID NO: 600 - RNA, 19 nt, Artificial Sequence
  Synthetic
gaccagaaguuucgaccaa

SEQ ID NO: 601 - RNA, 19 nt, Artificial Sequence
  Synthetic
guacauggcuccagaggua

SEQ ID NO: 602 - RNA, 19 nt, Artificial Sequence
  Synthetic
gaaugaagcaugagaacau

SEQ ID NO: 603 - RNA, 19 nt, Artificial Sequence
  Synthetic
ggcaauauguguaaugaaa

SEQ ID NO: 604 - RNA, 19 nt, Artificial Sequence
  Synthetic
gugaaggacaugagacuaa

SEQ ID NO: 605 - RNA, 19 nt, Artificial Sequence
  Synthetic
ccauugaaauagugaaaca

SEQ ID NO: 606 - RNA, 19 nt, Artificial Sequence
  Synthetic
aggaaguuguugugcauaa

SEQ ID NO: 607 - RNA, 19 nt, Artificial Sequence
  Synthetic
ggacaugagacuaagagaa

SEQ ID NO: 608 - RNA, 19 nt, Artificial Sequence
  Synthetic
gacaugagacuaagagaaa

SEQ ID NO: 609 - RNA, 19 nt, Artificial Sequence
  Synthetic
gguauuagagggugcuaua

SEQ ID NO: 610 - RNA, 19 nt, Artificial Sequence
  Synthetic
ggacaaacagucauggcaa

SEQ ID NO: 611 - RNA, 19 nt, Artificial Sequence
  Synthetic
gacaaacagucauggcaaa

SEQ ID NO: 612 - RNA, 19 nt, Artificial Sequence
  Synthetic
cugugaaaccauugaagaa

SEQ ID NO: 613 - RNA, 19 nt, Artificial Sequence
  Synthetic
gggauuaguccuaugggaa

SEQ ID NO: 614 - RNA, 19 nt, Artificial Sequence
  Synthetic
augcagagacuaacaaaua

SEQ ID NO: 615 - RNA, 19 nt, Artificial Sequence
  Synthetic
ccuaaaagauggccacaaa

SEQ ID NO: 616 - RNA, 19 nt, Artificial Sequence
  Synthetic
agauggaccuguagaugaa

SEQ ID NO: 617 - RNA, 19 nt, Artificial Sequence
  Synthetic
gcaguuauuagaagugaaa

SEQ ID NO: 618 - RNA, 19 nt, Artificial Sequence
  Synthetic
ggauauaccuggccuaaaa

SEQ ID NO: 619 - RNA, 19 nt, Artificial Sequence
  Synthetic
gcuaauggaguguuugaaa

SEQ ID NO: 620 - RNA, 19 nt, Artificial Sequence
  Synthetic
cagacuuucuuaaggcuaa

SEQ ID NO: 621 - RNA, 19 nt, Artificial Sequence
  Synthetic
gcaggaaguuguugugcau

SEQ ID NO: 622 - RNA, 19 nt, Artificial Sequence
  Synthetic
ggugacaaauguugacuuu

SEQ ID NO: 623 - RNA, 19 nt, Artificial Sequence
  Synthetic
cuuuaaugcuaauugggaa

SEQ ID NO: 624 - RNA, 19 nt, Artificial Sequence
  Synthetic
gcagaaacaugcuggaaug

SEQ ID NO: 625 - RNA, 19 nt, Artificial Sequence
  Synthetic
gggcaauauguguaaugaa

SEQ ID NO: 626 - RNA, 19 nt, Artificial Sequence
  Synthetic
acccagaugcagagacuaa

SEQ ID NO: 627 - RNA, 19 nt, Artificial Sequence
  Synthetic
aauacgaagucuacaguuu

SEQ ID NO: 628 - RNA, 19 nt, Artificial Sequence
  Synthetic
cuauaaacuuccaaaggga

SEQ ID NO: 629 - RNA, 19 nt, Artificial Sequence
  Synthetic
ggauagauauguaugccau

SEQ ID NO: 630 - RNA, 19 nt, Artificial Sequence
  Synthetic
ggucugggcuuccgaauau

SEQ ID NO: 631 - RNA, 19 nt, Artificial Sequence
  Synthetic
ccaucgagcucgugaagaa

SEQ ID NO: 632 - RNA, 19 nt, Artificial Sequence
  Synthetic
ccaucaacuuccagagaga

SEQ ID NO: 633 - RNA, 19 nt, Artificial Sequence
  Synthetic
gcgaaggcgagcaggacaa

SEQ ID NO: 634 - RNA, 19 nt, Artificial Sequence
  Synthetic
guaagaauguauugcugaa

SEQ ID NO: 635 - RNA, 19 nt, Artificial Sequence
  Synthetic
gcuccaaccucgaaguaga

SEQ ID NO: 636 - RNA, 19 nt, Artificial Sequence
  Synthetic
cggauuaccucaaggggaa

SEQ ID NO: 637 - RNA, 19 nt, Artificial Sequence
  Synthetic
ccuaaagagucaagcaucu

SEQ ID NO: 638 - RNA, 19 nt, Artificial Sequence
  Synthetic
aggaggugguggugcacaa

SEQ ID NO: 639 - RNA, 19 nt, Artificial Sequence
  Synthetic
gcaugaagcacgagaaccu

SEQ ID NO: 640 - RNA, 19 nt, Artificial Sequence
  Synthetic
gaagaagggcugcuggcua

SEQ ID NO: 641 - RNA, 19 nt, Artificial Sequence
  Synthetic
auguauugcugaagagcga

SEQ ID NO: 642 - RNA, 19 nt, Artificial Sequence
  Synthetic
ucgauuugagccagggaaa

SEQ ID NO: 643 - RNA, 19 nt, Artificial Sequence
  Synthetic
aagaugaggcccaccauua

SEQ ID NO: 644 - RNA, 19 nt, Artificial Sequence
  Synthetic
gggagugcaucuacuacaa

SEQ ID NO: 645 - RNA, 19 nt, Artificial Sequence
  Synthetic
gacaagcagucguggcaga

SEQ ID NO: 646 - RNA, 19 nt, Artificial Sequence
  Synthetic
ggaccaugaugcagaggcu

SEQ ID NO: 647 - RNA, 19 nt, Artificial Sequence
  Synthetic
guacauggcuccugaggug

SEQ ID NO: 648 - RNA, 19 nt, Artificial Sequence
  Synthetic
cacaagaagaugaggccca

SEQ ID NO: 649 - RNA, 19 nt, Artificial Sequence
  Synthetic
uggcuuggcuguucgauuu

SEQ ID NO: 650 - RNA, 19 nt, Artificial Sequence
  Synthetic
guucauugcugccgagaag

SEQ ID NO: 651 - RNA, 19 nt, Artificial Sequence
  Synthetic
gaacgaacugugucaugua

SEQ ID NO: 652 - RNA, 19 nt, Artificial Sequence
  Synthetic
aggugguggugcacaagaa

SEQ ID NO: 653 - RNA, 19 nt, Artificial Sequence
  Synthetic
aagaauguauugcugaaga

SEQ ID NO: 654 - RNA, 19 nt, Artificial Sequence
  Synthetic
agagugaacgggagaucuu

SEQ ID NO: 655 - RNA, 19 nt, Artificial Sequence
  Synthetic
uggaggagcugcaggaggu

SEQ ID NO: 656 - RNA, 19 nt, Artificial Sequence
  Synthetic
auuaaagaucacugguuga

SEQ ID NO: 657 - RNA, 19 nt, Artificial Sequence
  Synthetic
gcugcuggcuagaugacuu

SEQ ID NO: 658 - RNA, 19 nt, Artificial Sequence
  Synthetic
ggaacaucaucacauggaa

SEQ ID NO: 659 - RNA, 19 nt, Artificial Sequence
  Synthetic
ccauuaaagaucacugguu

SEQ ID NO: 660 - RNA, 19 nt, Artificial Sequence
  Synthetic
gacuucaacugcuacgaua

SEQ ID NO: 661 - RNA, 19 nt, Artificial Sequence
  Synthetic
gcaggaagacgcuggaaua

SEQ ID NO: 662 - RNA, 19 nt, Artificial Sequence
  Synthetic
ggguagagguagugugagu

SEQ ID NO: 663 - RNA, 19 nt, Artificial Sequence
  Synthetic
ccagagaagccuaaaguga

SEQ ID NO: 664 - RNA, 19 nt, Artificial Sequence
  Synthetic
gcuuugaggacaugaagaa

SEQ ID NO: 665 - RNA, 19 nt, Artificial Sequence
  Synthetic
ugguggagugugugggaaa

SEQ ID NO: 666 - RNA, 19 nt, Artificial Sequence
  Synthetic
agagaagccuaaagugauu

SEQ ID NO: 667 - RNA, 19 nt, Artificial Sequence
  Synthetic
ugaagaagguggugugugu

SEQ ID NO: 668 - RNA, 19 nt, Artificial Sequence
  Synthetic
ggaagacgcuggaauaaga

SEQ ID NO: 669 - RNA, 19 nt, Artificial Sequence
  Synthetic
caguagugcuggugcggga

SEQ ID NO: 670 - RNA, 19 nt, Artificial Sequence
  Synthetic
agccuaaagugauucaaua

SEQ ID NO: 671 - RNA, 19 nt, Artificial Sequence
  Synthetic
gcucagaugaugcgggagu

SEQ ID NO: 672 - RNA, 19 nt, Artificial Sequence
  Synthetic
cgggagugcugguacccaa

SEQ ID NO: 673 - RNA, 19 nt, Artificial Sequence
  Synthetic
caggaagacgcuggaauaa

SEQ ID NO: 674 - RNA, 19 nt, Artificial Sequence
  Synthetic
acacaguauugcucagaca

SEQ ID NO: 675 - RNA, 19 nt, Artificial Sequence
  Synthetic
cagagaagccuaaagugau

SEQ ID NO: 676 - RNA, 19 nt, Artificial Sequence
  Synthetic
ccaccgaguucgucaacca

SEQ ID NO: 677 - RNA, 19 nt, Artificial Sequence
  Synthetic
acgacuuucugcagagaca

SEQ ID NO: 678 - RNA, 19 nt, Artificial Sequence
  Synthetic
ucuaugauguggugcccaa

SEQ ID NO: 679 - RNA, 19 nt, Artificial Sequence
  Synthetic
gaucaagaagacacuacaa

SEQ ID NO: 680 - RNA, 19 nt, Artificial Sequence
  Synthetic
auggcaucguggaggacua

SEQ ID NO: 681 - RNA, 19 nt, Artificial Sequence
  Synthetic
ggaaaggccuucugaugcu

SEQ ID NO: 682 - RNA, 19 nt, Artificial Sequence
  Synthetic
uagcaacaguccagagaag

SEQ ID NO: 683 - RNA, 19 nt, Artificial Sequence
  Synthetic
ccuuggugacccagggaga

SEQ ID NO: 684 - RNA, 19 nt, Artificial Sequence
  Synthetic
ccgaguucgucaaccacua

SEQ ID NO: 685 - RNA, 19 nt, Artificial Sequence
  Synthetic
gggaccuccuggacaguga

SEQ ID NO: 686 - RNA, 19 nt, Artificial Sequence
  Synthetic
ucaagaagacacuacaaaa

SEQ ID NO: 687 - RNA, 19 nt, Artificial Sequence
  Synthetic
gugagaguguggccgucaa

SEQ ID NO: 688 - RNA, 19 nt, Artificial Sequence
  Synthetic
ccagagggaccaugaccuu

SEQ ID NO: 689 - RNA, 19 nt, Artificial Sequence
  Synthetic
gcuggaauaagaaacauuu

SEQ ID NO: 690 - RNA, 19 nt, Artificial Sequence
  Synthetic
agacugagaucuauaacac

SEQ ID NO: 691 - RNA, 19 nt, Artificial Sequence
  Synthetic
gcaaauagaaugagaacca

SEQ ID NO: 692 - RNA, 19 nt, Artificial Sequence
  Synthetic
gcuaaacacagcagagaua

SEQ ID NO: 693 - RNA, 19 nt, Artificial Sequence
  Synthetic
guucaaagaucgggauaaa

SEQ ID NO: 694 - RNA, 19 nt, Artificial Sequence
  Synthetic
cgacagcaguucagccaaa

SEQ ID NO: 695 - RNA, 19 nt, Artificial Sequence
  Synthetic
gaauggugaaggugaaaua

SEQ ID NO: 696 - RNA, 19 nt, Artificial Sequence
  Synthetic
ucaaagaucgggauaaaua

SEQ ID NO: 697 - RNA, 19 nt, Artificial Sequence
  Synthetic
ugagaauggugaaggugaa

SEQ ID NO: 698 - RNA, 19 nt, Artificial Sequence
  Synthetic
cagaggcacucaugggaaa

SEQ ID NO: 699 - RNA, 19 nt, Artificial Sequence
  Synthetic
gaagcaacccacaggcaaa

SEQ ID NO: 700 - RNA, 19 nt, Artificial Sequence
  Synthetic
gauuauaaggccauguuua

SEQ ID NO: 701 - RNA, 19 nt, Artificial Sequence
  Synthetic
gaagauggcuuauugguuu

SEQ ID NO: 702 - RNA, 19 nt, Artificial Sequence
  Synthetic
uuacaggauugaagaaaga

SEQ ID NO: 703 - RNA, 19 nt, Artificial Sequence
  Synthetic
ggacugggaugaaggaguu

SEQ ID NO: 704 - RNA, 19 nt, Artificial Sequence
  Synthetic
gcgccaacgucaaugauuu

SEQ ID NO: 705 - RNA, 19 nt, Artificial Sequence
  Synthetic
uaaaggaaacccuaggaaa

SEQ ID NO: 706 - RNA, 19 nt, Artificial Sequence
  Synthetic
ucagguaaguucagauuuu

SEQ ID NO: 707 - RNA, 19 nt, Artificial Sequence
  Synthetic
augagaacauggaugcuua

SEQ ID NO: 708 - RNA, 19 nt, Artificial Sequence
  Synthetic
ggaaaggacuuguucugau

SEQ ID NO: 709 - RNA, 19 nt, Artificial Sequence
  Synthetic
auauguaaguggagaauuc

SEQ ID NO: 710 - RNA, 19 nt, Artificial Sequence
  Synthetic
gagacuacauggagaggaa

SEQ ID NO: 711 - RNA, 19 nt, Artificial Sequence
  Synthetic
ggaacaagaucgacgucaa

SEQ ID NO: 712 - RNA, 19 nt, Artificial Sequence
  Synthetic
gagcacaagaagaagaaua

SEQ ID NO: 713 - RNA, 19 nt, Artificial Sequence
  Synthetic
ugaagagagugaaggagua

SEQ ID NO: 714 - RNA, 19 nt, Artificial Sequence
  Synthetic
ggcaagauguauagugaga

SEQ ID NO: 715 - RNA, 19 nt, Artificial Sequence
  Synthetic
gcaaggagauccaugauuu

SEQ ID NO: 716 - RNA, 19 nt, Artificial Sequence
  Synthetic
cgggaaaggcggagauugu

SEQ ID NO: 717 - RNA, 19 nt, Artificial Sequence
  Synthetic
ggacugacaugaagagagu

SEQ ID NO: 718 - RNA, 19 nt, Artificial Sequence
  Synthetic
uggaugaagccaagaagaa

SEQ ID NO: 719 - RNA, 19 nt, Artificial Sequence
  Synthetic
cagaaaggcucucaagcuu

SEQ ID NO: 720 - RNA, 19 nt, Artificial Sequence
  Synthetic
uagcugagcacaagaagaa

SEQ ID NO: 721 - RNA, 19 nt, Artificial Sequence
  Synthetic
caacagaggcaucagccaa

SEQ ID NO: 722 - RNA, 19 nt, Artificial Sequence
  Synthetic
ccaagaagaaccugccuuu

SEQ ID NO: 723 - RNA, 19 nt, Artificial Sequence
  Synthetic
ucccagaguuugaguuuau

SEQ ID NO: 724 - RNA, 19 nt, Artificial Sequence
  Synthetic
uuauguggcuuguggauga

SEQ ID NO: 725 - RNA, 19 nt, Artificial Sequence
  Synthetic
ugggcaagauguauaguga

SEQ ID NO: 726 - RNA, 19 nt, Artificial Sequence
  Synthetic
gagugaaggaguacagcca

SEQ ID NO: 727 - RNA, 19 nt, Artificial Sequence
  Synthetic
cgacggcugucaucaguua

SEQ ID NO: 728 - RNA, 19 nt, Artificial Sequence
  Synthetic
ggaggaaugcugagaaggu

SEQ ID NO: 729 - RNA, 19 nt, Artificial Sequence
  Synthetic
gagcgcuagcugagcacaa

SEQ ID NO: 730 - RNA, 19 nt, Artificial Sequence
  Synthetic
cacugaggacuuagagauu

SEQ ID NO: 731 - RNA, 19 nt, Artificial Sequence
  Synthetic
acaugaagagagugaagga

SEQ ID NO: 732 - RNA, 19 nt, Artificial Sequence
  Synthetic
gaucgugggacucggucaa

SEQ ID NO: 733 - RNA, 19 nt, Artificial Sequence
  Synthetic
gcugagcacaagaagaaga

SEQ ID NO: 734 - RNA, 19 nt, Artificial Sequence
  Synthetic
acugacaugaagagaguga

SEQ ID NO: 735 - RNA, 19 nt, Artificial Sequence
  Synthetic
augaagagagugaaggagu

SEQ ID NO: 736 - RNA, 19 nt, Artificial Sequence
  Synthetic
uggacuaccuguugccaga

SEQ ID NO: 737 - RNA, 19 nt, Artificial Sequence
  Synthetic
agguaaagcuugagagcaa

SEQ ID NO: 738 - RNA, 19 nt, Artificial Sequence
  Synthetic
cugagauuguggaggaauu

SEQ ID NO: 739 - RNA, 19 nt, Artificial Sequence
  Synthetic
ccggaaaccuccagaaaau

SEQ ID NO: 740 - RNA, 19 nt, Artificial Sequence
  Synthetic
ccuuggaaauggccggaaa

SEQ ID NO: 741 - RNA, 19 nt, Artificial Sequence
  Synthetic
ccagagaagucuuggugga

SEQ ID NO: 742 - RNA, 19 nt, Artificial Sequence
  Synthetic
gagaagucuugguggaaac

SEQ ID NO: 743 - RNA, 19 nt, Artificial Sequence
  Synthetic
gcugaugacucacaaggua

SEQ ID NO: 744 - RNA, 19 nt, Artificial Sequence
  Synthetic
ggaaacguaugaagagagu

SEQ ID NO: 745 - RNA, 19 nt, Artificial Sequence
  Synthetic
uagaacacuuccaggucaa

SEQ ID NO: 746 - RNA, 19 nt, Artificial Sequence
  Synthetic
cugaugacucacaagguaa

SEQ ID NO: 747 - RNA, 19 nt, Artificial Sequence
  Synthetic
cuggaaacauccugguuca

SEQ ID NO: 748 - RNA, 19 nt, Artificial Sequence
  Synthetic
caggaauucccguggacuu

SEQ ID NO: 749 - RNA, 19 nt, Artificial Sequence
  Synthetic
agagaagucuugguggaaa

SEQ ID NO: 750 - RNA, 19 nt, Artificial Sequence
  Synthetic
ucaacaugcuccugaagau

SEQ ID NO: 751 - RNA, 19 nt, Artificial Sequence
  Synthetic
uguacaaagcauacgccaa

SEQ ID NO: 752 - RNA, 19 nt, Artificial Sequence
  Synthetic
cuuuggauaccuuggaaau

SEQ ID NO: 753 - RNA, 19 nt, Artificial Sequence
  Synthetic
uggaggaauuugagaagcu

SEQ ID NO: 754 - RNA, 19 nt, Artificial Sequence
  Synthetic
aaacguaugaagagagugu

SEQ ID NO: 755 - RNA, 19 nt, Artificial Sequence
  Synthetic
gaagaugauauuuguggau

SEQ ID NO: 756 - RNA, 19 nt, Artificial Sequence
  Synthetic
guggaaacguaugaagaga

SEQ ID NO: 757 - RNA, 19 nt, Artificial Sequence
  Synthetic
uggcuuagcuugccugaga

SEQ ID NO: 758 - RNA, 19 nt, Artificial Sequence
  Synthetic
cugccuuccuggagacuga

SEQ ID NO: 759 - RNA, 19 nt, Artificial Sequence
  Synthetic
ggaucaacaugcuccugaa

SEQ ID NO: 760 - RNA, 19 nt, Artificial Sequence
  Synthetic
ggacagaguucacagacca

SEQ ID NO: 761 - RNA, 19 nt, Artificial Sequence
  Synthetic
gcuuugaaaccaaggcauu

SEQ ID NO: 762 - RNA, 19 nt, Artificial Sequence
  Synthetic
cggagguggccgugaagau

SEQ ID NO: 763 - RNA, 19 nt, Artificial Sequence
  Synthetic
uggcagaugcugagaguuc

SEQ ID NO: 764 - RNA, 19 nt, Artificial Sequence
  Synthetic
guuaaggagcugugcacga

SEQ ID NO: 765 - RNA, 19 nt, Artificial Sequence
  Synthetic
aggccaaugccgagcggau

SEQ ID NO: 766 - RNA, 19 nt, Artificial Sequence
  Synthetic
cggcauagcccagagcauu

SEQ ID NO: 767 - RNA, 19 nt, Artificial Sequence
  Synthetic
gggcuuggggcuaggagua

SEQ ID NO: 768 - RNA, 19 nt, Artificial Sequence
  Synthetic
acguggaggcagugaugau

SEQ ID NO: 769 - RNA, 19 nt, Artificial Sequence
  Synthetic
cagcugauggagacagaga

SEQ ID NO: 770 - RNA, 19 nt, Artificial Sequence
  Synthetic
gcaucagccgcuuggccaa

SEQ ID NO: 771 - RNA, 19 nt, Artificial Sequence
  Synthetic
ccggcauagcccagagcau

SEQ ID NO: 772 - RNA, 19 nt, Artificial Sequence
  Synthetic
ccucaagguuggccagaug

SEQ ID NO: 773 - RNA, 19 nt, Artificial Sequence
  Synthetic
gcuggcagaugcugagagu

SEQ ID NO: 774 - RNA, 19 nt, Artificial Sequence
  Synthetic
cggaggagcucuaccagua

SEQ ID NO: 775 - RNA, 19 nt, Artificial Sequence
  Synthetic
cggccuacaugguggacau

SEQ ID NO: 776 - RNA, 19 nt, Artificial Sequence
  Synthetic
gcaacguucuggugcggaa

SEQ ID NO: 777 - RNA, 19 nt, Artificial Sequence
  Synthetic
cugugaaggugcaguacau

SEQ ID NO: 778 - RNA, 19 nt, Artificial Sequence
  Synthetic
ggcuggacuucgagaauga

SEQ ID NO: 779 - RNA, 19 nt, Artificial Sequence
  Synthetic
gcacgggagaagaggagga

SEQ ID NO: 780 - RNA, 19 nt, Artificial Sequence
  Synthetic
ggagcuggacuucgagaau

SEQ ID NO: 781 - RNA, 19 nt, Artificial Sequence
  Synthetic
ucaacgauguggaggccau

SEQ ID NO: 782 - RNA, 19 nt, Artificial Sequence
  Synthetic
uggcagaggcacgggagaa

SEQ ID NO: 783 - RNA, 19 nt, Artificial Sequence
  Synthetic
gugcaugacauagcagaaa

SEQ ID NO: 784 - RNA, 19 nt, Artificial Sequence
  Synthetic
agcuggacuucgagaauga

SEQ ID NO: 785 - RNA, 19 nt, Artificial Sequence
  Synthetic
gcugcaaggucaacgaugu

SEQ ID NO: 786 - RNA, 19 nt, Artificial Sequence
  Synthetic
caggcuacuuggaggugau

SEQ ID NO: 787 - RNA, 19 nt, Artificial Sequence
  Synthetic
gcuggcagugcaugacaua

SEQ ID NO: 788 - RNA, 19 nt, Artificial Sequence
  Synthetic
uggaugaguuguuccuuga

SEQ ID NO: 789 - RNA, 19 nt, Artificial Sequence
  Synthetic
gcagaggcacgggagaaga

SEQ ID NO: 790 - RNA, 19 nt, Artificial Sequence
  Synthetic
gugcaccaauguuguccuu

SEQ ID NO: 791 - RNA, 19 nt, Artificial Sequence
  Synthetic
ccaggagguggaugaguug

SEQ ID NO: 792 - RNA, 19 nt, Artificial Sequence
  Synthetic
cggugcagcucugucauuu

SEQ ID NO: 793 - RNA, 19 nt, Artificial Sequence
  Synthetic
gggcuggacuucgagaaug

SEQ ID NO: 794 - RNA, 19 nt, Artificial Sequence
  Synthetic
ugggagaugcucaaguuug

SEQ ID NO: 795 - RNA, 19 nt, Artificial Sequence
  Synthetic
gaccggugcagcucuguca

SEQ ID NO: 796 - RNA, 19 nt, Artificial Sequence
  Synthetic
gcucugucauuuccacucu

SEQ ID NO: 797 - RNA, 19 nt, Artificial Sequence
  Synthetic
gaucaagaccagaaagaaa

SEQ ID NO: 798 - RNA, 19 nt, Artificial Sequence
  Synthetic
gggagauccugaagagaaa

SEQ ID NO: 799 - RNA, 19 nt, Artificial Sequence
  Synthetic
cauuaaagagauagccaaa

SEQ ID NO: 800 - RNA, 19 nt, Artificial Sequence
  Synthetic
ugaugaaaguuaugccuua

SEQ ID NO: 801 - RNA, 19 nt, Artificial Sequence
  Synthetic
gcagcaagcaucauaauua

SEQ ID NO: 802 - RNA, 19 nt, Artificial Sequence
  Synthetic
caucauaauuagacggacu

SEQ ID NO: 803 - RNA, 19 nt, Artificial Sequence
  Synthetic
augcauugggauagauaaa

SEQ ID NO: 804 - RNA, 19 nt, Artificial Sequence
  Synthetic
gguaaugcuuguagaaucu

SEQ ID NO: 805 - RNA, 19 nt, Artificial Sequence
  Synthetic
gcauugggauagauaaauu

SEQ ID NO: 806 - RNA, 19 nt, Artificial Sequence
  Synthetic
acacaaagcagcaacauuu

SEQ ID NO: 807 - RNA, 19 nt, Artificial Sequence
  Synthetic
acucaaagaggcagcgaau

SEQ ID NO: 808 - RNA, 19 nt, Artificial Sequence
  Synthetic
gcacucaacauguaauaaa

SEQ ID NO: 809 - RNA, 19 nt, Artificial Sequence
  Synthetic
caauggagcuggagaugca

SEQ ID NO: 810 - RNA, 19 nt, Artificial Sequence
  Synthetic
agacacaagcccugccaaa

SEQ ID NO: 811 - RNA, 19 nt, Artificial Sequence
  Synthetic
agcaaggcuuugagacuaa

SEQ ID NO: 812 - RNA, 19 nt, Artificial Sequence
  Synthetic
gagcaaggcuuugagacua

SEQ ID NO: 813 - RNA, 19 nt, Artificial Sequence
  Synthetic
uauaauggcuacagaaagu

SEQ ID NO: 814 - RNA, 19 nt, Artificial Sequence
  Synthetic
acuauaauggcuacagaaa

SEQ ID NO: 815 - RNA, 19 nt, Artificial Sequence
  Synthetic
ccuaauugcuuccugacaa

SEQ ID NO: 816 - RNA, 19 nt, Artificial Sequence
  Synthetic
ccaaagaugaacucaaaga

SEQ ID NO: 817 - RNA, 19 nt, Artificial Sequence
  Synthetic
guuugaugaacuugugaaa

SEQ ID NO: 818 - RNA, 19 nt, Artificial Sequence
  Synthetic
acaaggaacuguuugauga

SEQ ID NO: 819 - RNA, 19 nt, Artificial Sequence
  Synthetic
ggacaaagauuuccuugau

SEQ ID NO: 820 - RNA, 19 nt, Artificial Sequence
  Synthetic
ugccaaagaugaacucaaa

SEQ ID NO: 821 - RNA, 19 nt, Artificial Sequence
  Synthetic
ggaacuguuugaugaacuu

SEQ ID NO: 822 - RNA, 19 nt, Artificial Sequence
  Synthetic
ggaugcauugggauagaua

SEQ ID NO: 823 - RNA, 19 nt, Artificial Sequence
  Synthetic
acaucuugaucuggagaaa

SEQ ID NO: 824 - RNA, 19 nt, Artificial Sequence
  Synthetic
caguauuaaagguggcuca

SEQ ID NO: 825 - RNA, 19 nt, Artificial Sequence
  Synthetic
agacagaagcugccacuuu

SEQ ID NO: 826 - RNA, 19 nt, Artificial Sequence
  Synthetic
cugcuguaguggacaaaga

SEQ ID NO: 827 - RNA, 19 nt, Artificial Sequence
  Synthetic
agcuuuaauuggacagaaa

SEQ ID NO: 828 - RNA, 19 nt, Artificial Sequence
  Synthetic
ccaccucauuuuagaguau

SEQ ID NO: 829 - RNA, 19 nt, Artificial Sequence
  Synthetic
uggccuuaguccugggaau

SEQ ID NO: 830 - RNA, 19 nt, Artificial Sequence
  Synthetic
cauucgaacuguaggccuu

SEQ ID NO: 831 - RNA, 19 nt, Artificial Sequence
  Synthetic
caggaaagaugcagaggaa

SEQ ID NO: 832 - RNA, 19 nt, Artificial Sequence
  Synthetic
gggaauggauuguagauau

SEQ ID NO: 833 - RNA, 19 nt, Artificial Sequence
  Synthetic
gcaaagggaaagaggaaaa

SEQ ID NO: 834 - RNA, 19 nt, Artificial Sequence
  Synthetic
ggaauggauuguagauauu

SEQ ID NO: 835 - RNA, 19 nt, Artificial Sequence
  Synthetic
ggaaagaugcagaggaaag

SEQ ID NO: 836 - RNA, 19 nt, Artificial Sequence
  Synthetic
gcgucuacgugguggccaa

SEQ ID NO: 837 - RNA, 19 nt, Artificial Sequence
  Synthetic
gcacaaauccaacauguua

SEQ ID NO: 838 - RNA, 19 nt, Artificial Sequence
  Synthetic
gggagaagaaagcggccaa

SEQ ID NO: 839 - RNA, 19 nt, Artificial Sequence
  Synthetic
ggaaugaucaugaaugcaa

SEQ ID NO: 840 - RNA, 19 nt, Artificial Sequence
  Synthetic
ccaguagguuucaugguua

SEQ ID NO: 841 - RNA, 19 nt, Artificial Sequence
  Synthetic
gagaaagggucuagaaugc

SEQ ID NO: 842 - RNA, 19 nt, Artificial Sequence
  Synthetic
gcuacaucggcgugagcua

SEQ ID NO: 843 - RNA, 19 nt, Artificial Sequence
  Synthetic
gaaugaucaugaaugcaaa

SEQ ID NO: 844 - RNA, 19 nt, Artificial Sequence
  Synthetic
caaccaaccaguucagaau

SEQ ID NO: 845 - RNA, 19 nt, Artificial Sequence
  Synthetic
ccauuaagguccacaccau

SEQ ID NO: 846 - RNA, 19 nt, Artificial Sequence
  Synthetic
gaauaagacagcgcggaaa

SEQ ID NO: 847 - RNA, 19 nt, Artificial Sequence
  Synthetic
gaugaaaucuugcucagaa

SEQ ID NO: 848 - RNA, 19 nt, Artificial Sequence
  Synthetic
uggcguuugugaauggaaa

SEQ ID NO: 849 - RNA, 19 nt, Artificial Sequence
  Synthetic
ugacauuuaugccggaauu

SEQ ID NO: 850 - RNA, 19 nt, Artificial Sequence
  Synthetic
ugacaucgcuuguuccuaa

SEQ ID NO: 851 - RNA, 19 nt, Artificial Sequence
  Synthetic
aagcuauggcuauguauua

SEQ ID NO: 852 - RNA, 19 nt, Artificial Sequence
  Synthetic
agacaggaccaaucaaaga

SEQ ID NO: 853 - RNA, 19 nt, Artificial Sequence
  Synthetic
ccaucaaguuccaaccauu

SEQ ID NO: 854 - RNA, 19 nt, Artificial Sequence
  Synthetic
ggacaagacaggaccaauc

SEQ ID NO: 855 - RNA, 19 nt, Artificial Sequence
  Synthetic
caucaaguuccaaccauua

SEQ ID NO: 856 - RNA, 19 nt, Artificial Sequence
  Synthetic
caaccaguucagaaugaua

SEQ ID NO: 857 - RNA, 19 nt, Artificial Sequence
  Synthetic
cagccacauuugacauuua

SEQ ID NO: 858 - RNA, 19 nt, Artificial Sequence
  Synthetic
acaaggacauggugcgcau

SEQ ID NO: 859 - RNA, 19 nt, Artificial Sequence
  Synthetic
guagauauuucaccaagaa

SEQ ID NO: 860 - RNA, 19 nt, Artificial Sequence
  Synthetic
gcauaucaagcaugugaau

SEQ ID NO: 861 - RNA, 19 nt, Artificial Sequence
  Synthetic
uuuaaguucuccagggaaa

SEQ ID NO: 862 - RNA, 19 nt, Artificial Sequence
  Synthetic
gggaaaagaaagcagcuaa

SEQ ID NO: 863 - RNA, 19 nt, Artificial Sequence
  Synthetic
cagcuaagacguugggcau

SEQ ID NO: 864 - RNA, 19 nt, Artificial Sequence
  Synthetic
gggcggaucuucugugaca

SEQ ID NO: 865 - RNA, 19 nt, Artificial Sequence
  Synthetic
gggcggacucuaagaugaa

SEQ ID NO: 866 - RNA, 19 nt, Artificial Sequence
  Synthetic
aggcaggagucaugaagga

SEQ ID NO: 867 - RNA, 19 nt, Artificial Sequence
  Synthetic
gugucuauauaguggccaa

SEQ ID NO: 868 - RNA, 19 nt, Artificial Sequence
  Synthetic
cccuagaggugcucggcua

SEQ ID NO: 869 - RNA, 19 nt, Artificial Sequence
  Synthetic
ccaaccagaccucgagcaa

SEQ ID NO: 870 - RNA, 19 nt, Artificial Sequence
  Synthetic
ccaacuacuucauugucaa

SEQ ID NO: 871 - RNA, 19 nt, Artificial Sequence
  Synthetic
gaggacacccuuagcagua

SEQ ID NO: 872 - RNA, 19 nt, Artificial Sequence
  Synthetic
ccuucaagcuccugaccga

SEQ ID NO: 873 - RNA, 19 nt, Artificial Sequence
  Synthetic
ccaagaacuuucacgagga

SEQ ID NO: 874 - RNA, 19 nt, Artificial Sequence
  Synthetic
caggagucaugaaggagau

SEQ ID NO: 875 - RNA, 19 nt, Artificial Sequence
  Synthetic
gcaggagucaugaaggaga

SEQ ID NO: 876 - RNA, 19 nt, Artificial Sequence
  Synthetic
gcaaggacucgcuggacga

SEQ ID NO: 877 - RNA, 19 nt, Artificial Sequence
  Synthetic
gcaacauccuagucaucuu

SEQ ID NO: 878 - RNA, 19 nt, Artificial Sequence
  Synthetic
cuauauaguggccaagaga

SEQ ID NO: 879 - RNA, 19 nt, Artificial Sequence
  Synthetic
ucaugaaggagauguccaa

SEQ ID NO: 880 - RNA, 19 nt, Artificial Sequence
  Synthetic
caccaagaaccuagaggca

SEQ ID NO: 881 - RNA, 19 nt, Artificial Sequence
  Synthetic
aaccagaccucgagcaacu

SEQ ID NO: 882 - RNA, 19 nt, Artificial Sequence
  Synthetic
ccaagaaccuagaggcagg

SEQ ID NO: 883 - RNA, 19 nt, Artificial Sequence
  Synthetic
ccgaccugcuguugagcuu

SEQ ID NO: 884 - RNA, 19 nt, Artificial Sequence
  Synthetic
cggucauucuagucaugua

SEQ ID NO: 885 - RNA, 19 nt, Artificial Sequence
  Synthetic
auauaguggccaagagaac

SEQ ID NO: 886 - RNA, 19 nt, Artificial Sequence
  Synthetic
agaaagcagcuaagacguu

SEQ ID NO: 887 - RNA, 19 nt, Artificial Sequence
  Synthetic
ccaagagaaccaccaagaa

SEQ ID NO: 888 - RNA, 19 nt, Artificial Sequence
  Synthetic
gccaagagaaccaccaaga

SEQ ID NO: 889 - RNA, 19 nt, Artificial Sequence
  Synthetic
gcuaagacguugggcauug

SEQ ID NO: 890 - RNA, 19 nt, Artificial Sequence
  Synthetic
agggcggacucuaagauga

SEQ ID NO: 891 - RNA, 19 nt, Artificial Sequence
  Synthetic
gagcaaaggucuaaaguuu

SEQ ID NO: 892 - RNA, 19 nt, Artificial Sequence
  Synthetic
cuauuuaacuugaggguaa

SEQ ID NO: 893 - RNA, 19 nt, Artificial Sequence
  Synthetic
cggaagacuuugugggcca

SEQ ID NO: 894 - RNA, 19 nt, Artificial Sequence
  Synthetic
gcauggaauuuguaaguuu

SEQ ID NO: 895 - RNA, 19 nt, Artificial Sequence
  Synthetic
gguacugugccuagcgaua

SEQ ID NO: 896 - RNA, 19 nt, Artificial Sequence
  Synthetic
caacagaacacuaaacaga

SEQ ID NO: 897 - RNA, 19 nt, Artificial Sequence
  Synthetic
ccucacuauucaaguauua

SEQ ID NO: 898 - RNA, 19 nt, Artificial Sequence
  Synthetic
guggauaucacguggaaca

SEQ ID NO: 899 - RNA, 19 nt, Artificial Sequence
  Synthetic
acguggaacaggagaaaga

SEQ ID NO: 900 - RNA, 19 nt, Artificial Sequence
  Synthetic
guggaacaggagaaagaaa

SEQ ID NO: 901 - RNA, 19 nt, Artificial Sequence
  Synthetic
auauauugcugcugguaau

SEQ ID NO: 902 - RNA, 19 nt, Artificial Sequence
  Synthetic
gaaccaagccuaugccauu

SEQ ID NO: 903 - RNA, 19 nt, Artificial Sequence
  Synthetic
gcuccagaagauugacaaa

SEQ ID NO: 904 - RNA, 19 nt, Artificial Sequence
  Synthetic
agguguggguggugggcau

SEQ ID NO: 905 - RNA, 19 nt, Artificial Sequence
  Synthetic
cgauaacauugauucacaa

SEQ ID NO: 906 - RNA, 19 nt, Artificial Sequence
  Synthetic
gcgauaacauugauucaca

SEQ ID NO: 907 - RNA, 19 nt, Artificial Sequence
  Synthetic
cccuuggacuugaggauuu

SEQ ID NO: 908 - RNA, 19 nt, Artificial Sequence
  Synthetic
caagggaggaauuguagua

SEQ ID NO: 909 - RNA, 19 nt, Artificial Sequence
  Synthetic
aaaauaaacugcuguguga

SEQ ID NO: 910 - RNA, 19 nt, Artificial Sequence
  Synthetic
uggaacaggagaaagaaaa

SEQ ID NO: 911 - RNA, 19 nt, Artificial Sequence
  Synthetic
gggucuuucaggaggccaa

SEQ ID NO: 912 - RNA, 19 nt, Artificial Sequence
  Synthetic
ggaacaggagaaagaaaau

SEQ ID NO: 913 - RNA, 19 nt, Artificial Sequence
  Synthetic
gaguggauaucacguggaa

SEQ ID NO: 914 - RNA, 19 nt, Artificial Sequence
  Synthetic
ugaucauggucuucgucua

SEQ ID NO: 915 - RNA, 19 nt, Artificial Sequence
  Synthetic
auagagauaugcagaagga

SEQ ID NO: 916 - RNA, 19 nt, Artificial Sequence
  Synthetic
gggcauggacuccgcagau

SEQ ID NO: 917 - RNA, 19 nt, Artificial Sequence
  Synthetic
gagcccagauuucaggauu

SEQ ID NO: 918 - RNA, 19 nt, Artificial Sequence
  Synthetic
uugccaaguucgagcgucu

SEQ ID NO: 919 - RNA, 19 nt, Artificial Sequence
  Synthetic
ccucaagacguuaggcauc

SEQ ID NO: 920 - RNA, 19 nt, Artificial Sequence
  Synthetic
gauuugaggagcagcuuca

SEQ ID NO: 921 - RNA, 19 nt, Artificial Sequence
  Synthetic
gcaagaaagccaagaacaa

SEQ ID NO: 922 - RNA, 19 nt, Artificial Sequence
  Synthetic
ggaagaauguggagcucaa

SEQ ID NO: 923 - RNA, 19 nt, Artificial Sequence
  Synthetic
agaaauucauugagagcga

SEQ ID NO: 924 - RNA, 19 nt, Artificial Sequence
  Synthetic
caagauccgcggugggaaa

SEQ ID NO: 925 - RNA, 19 nt, Artificial Sequence
  Synthetic
gggacguguuccagaaauu

SEQ ID NO: 926 - RNA, 19 nt, Artificial Sequence
  Synthetic
gcuggaggcucgcaagaaa

SEQ ID NO: 927 - RNA, 19 nt, Artificial Sequence
  Synthetic
augaggagaucaagaagua

SEQ ID NO: 928 - RNA, 19 nt, Artificial Sequence
  Synthetic
ccaugaagugccuggacaa

SEQ ID NO: 929 - RNA, 19 nt, Artificial Sequence
  Synthetic
gggcucaggaggugaaaga

SEQ ID NO: 930 - RNA, 19 nt, Artificial Sequence
  Synthetic
gcucaggaggugaaagaga

SEQ ID NO: 931 - RNA, 19 nt, Artificial Sequence
  Synthetic
acgagaagcuggagacgga

SEQ ID NO: 932 - RNA, 19 nt, Artificial Sequence
  Synthetic
ccaucaacgcugagacaga

SEQ ID NO: 933 - RNA, 19 nt, Artificial Sequence
  Synthetic
ggaagaaggagcugcgcga

SEQ ID NO: 934 - RNA, 19 nt, Artificial Sequence
  Synthetic
ugcccaagaugaagaacaa

SEQ ID NO: 935 - RNA, 19 nt, Artificial Sequence
  Synthetic
cgguuuugccaguggaaga

SEQ ID NO: 936 - RNA, 19 nt, Artificial Sequence
  Synthetic
gggagaucuucgacucaua

SEQ ID NO: 937 - RNA, 19 nt, Artificial Sequence
  Synthetic
ucgaugaggaggacacaaa

SEQ ID NO: 938 - RNA, 19 nt, Artificial Sequence
  Synthetic
agaccaaagacaagcauga

SEQ ID NO: 939 - RNA, 19 nt, Artificial Sequence
  Synthetic
uggaggagacgcagaucaa

SEQ ID NO: 940 - RNA, 19 nt, Artificial Sequence
  Synthetic
gcacaagaccaaagacaag

SEQ ID NO: 941 - RNA, 19 nt, Artificial Sequence
  Synthetic
gcagcugggccaugaggaa

SEQ ID NO: 942 - RNA, 19 nt, Artificial Sequence
  Synthetic
uggccauggagaagagcaa

SEQ ID NO: 943 - RNA, 19 nt, Artificial Sequence
  Synthetic
gcagugucaugcagaagua

SEQ ID NO: 944 - RNA, 19 nt, Artificial Sequence
  Synthetic
agaucaagaaguacgagaa

SEQ ID NO: 945 - RNA, 19 nt, Artificial Sequence
  Synthetic
cagcacaagaccaaagaca

SEQ ID NO: 946 - RNA, 19 nt, Artificial Sequence
  Synthetic
agaacaagcagcugggcca

SEQ ID NO: 947 - RNA, 19 nt, Artificial Sequence
  Synthetic
aagacaagcaugagaucga

SEQ ID NO: 948 - RNA, 19 nt, Artificial Sequence
  Synthetic
cgauaaguucacacgguuu

SEQ ID NO: 949 - RNA, 19 nt, Artificial Sequence
  Synthetic
uggaauucuaugaggagau

SEQ ID NO: 950 - RNA, 19 nt, Artificial Sequence
  Synthetic
ggaaucaaguuacuggaca

SEQ ID NO: 951 - RNA, 19 nt, Artificial Sequence
  Synthetic
ccaaauagaugcuggguua

SEQ ID NO: 952 - RNA, 19 nt, Artificial Sequence
  Synthetic
aagaaagaguugaacgaaa

SEQ ID NO: 953 - RNA, 19 nt, Artificial Sequence
  Synthetic
cagaauaaaaggagggaaa

SEQ ID NO: 954 - RNA, 19 nt, Artificial Sequence
  Synthetic
ggaaagauuuacagugauu

SEQ ID NO: 955 - RNA, 19 nt, Artificial Sequence
  Synthetic
gcaaugaaaugcuuagaua

SEQ ID NO: 956 - RNA, 19 nt, Artificial Sequence
  Synthetic
gcaguuauuuugagaguuu

SEQ ID NO: 957 - RNA, 19 nt, Artificial Sequence
  Synthetic
ggaagaaagaguugaacga

SEQ ID NO: 958 - RNA, 19 nt, Artificial Sequence
  Synthetic
gaaacaaggagaaacauua

SEQ ID NO: 959 - RNA, 19 nt, Artificial Sequence
  Synthetic
uugcagaagucgacaaauu

SEQ ID NO: 960 - RNA, 19 nt, Artificial Sequence
  Synthetic
aggagaaacauuagcuuua

SEQ ID NO: 961 - RNA, 19 nt, Artificial Sequence
  Synthetic
cagcaagaaguaacggaaa

SEQ ID NO: 962 - RNA, 19 nt, Artificial Sequence
  Synthetic
gauaagaagaggaucaaaa

SEQ ID NO: 963 - RNA, 19 nt, Artificial Sequence
  Synthetic
caaauauucucuuggauga

SEQ ID NO: 964 - RNA, 19 nt, Artificial Sequence
  Synthetic
gcauaggauuauuggacga

SEQ ID NO: 965 - RNA, 19 nt, Artificial Sequence
  Synthetic
gaggaaugaaugugucaaa

SEQ ID NO: 966 - RNA, 19 nt, Artificial Sequence
  Synthetic
ggagugugaugcagaagua

SEQ ID NO: 967 - RNA, 19 nt, Artificial Sequence
  Synthetic
ugagagugauccagaguuu

SEQ ID NO: 968 - RNA, 19 nt, Artificial Sequence
  Synthetic
uuagauaagaagaggauca

SEQ ID NO: 969 - RNA, 19 nt, Artificial Sequence
  Synthetic
aguuuaugguugcaggaaa

SEQ ID NO: 970 - RNA, 19 nt, Artificial Sequence
  Synthetic
ucucaggucucgacaauua

SEQ ID NO: 971 - RNA, 19 nt, Artificial Sequence
  Synthetic
gauguucaguguuggguaa

SEQ ID NO: 972 - RNA, 19 nt, Artificial Sequence
  Synthetic
cauaagaguuacuuugcaa

SEQ ID NO: 973 - RNA, 19 nt, Artificial Sequence
  Synthetic
ccaaagacaagcaugaaau

SEQ ID NO: 974 - RNA, 19 nt, Artificial Sequence
  Synthetic
accaagaacucuacaagaa

SEQ ID NO: 975 - RNA, 19 nt, Artificial Sequence
  Synthetic
aaugaaacaaggagaaaca

SEQ ID NO: 976 - RNA, 19 nt, Artificial Sequence
  Synthetic
gauuauuggacgaggagga

SEQ ID NO: 977 - RNA, 19 nt, Artificial Sequence
  Synthetic
agccauacauagaagaaau

SEQ ID NO: 978 - RNA, 19 nt, Artificial Sequence
  Synthetic
aggugaaguuuuaugaaga

SEQ ID NO: 979 - RNA, 19 nt, Artificial Sequence
  Synthetic
ggaaagcagacacuggaaa

SEQ ID NO: 980 - RNA, 19 nt, Artificial Sequence
  Synthetic
aaauagacuugaauggaga

SEQ ID NO: 981 - RNA, 19 nt, Artificial Sequence
  Synthetic
gcaagaagcugucggaaau

SEQ ID NO: 982 - RNA, 19 nt, Artificial Sequence
  Synthetic
ggcaagaagcugucggaaa

SEQ ID NO: 983 - RNA, 19 nt, Artificial Sequence
  Synthetic
gugagaagaucgugcagaa

SEQ ID NO: 984 - RNA, 19 nt, Artificial Sequence
  Synthetic
gaagagaagcugaagaaaa

SEQ ID NO: 985 - RNA, 19 nt, Artificial Sequence
  Synthetic
gcagcaaggagaagaguuu

SEQ ID NO: 986 - RNA, 19 nt, Artificial Sequence
  Synthetic
uggaagagaagcugaagaa

SEQ ID NO: 987 - RNA, 19 nt, Artificial Sequence
  Synthetic
agaagaucgugcagaagua

SEQ ID NO: 988 - RNA, 19 nt, Artificial Sequence
  Synthetic
aggugaaucuauugaaaga

SEQ ID NO: 989 - RNA, 19 nt, Artificial Sequence
  Synthetic
gcugagcacuaaaggaauu

SEQ ID NO: 990 - RNA, 19 nt, Artificial Sequence
  Synthetic
ugucggaaaucauggagaa

SEQ ID NO: 991 - RNA, 19 nt, Artificial Sequence
  Synthetic
cagcugagcacuaaaggaa

SEQ ID NO: 992 - RNA, 19 nt, Artificial Sequence
  Synthetic
gaaagaagaacaucaaaga

SEQ ID NO: 993 - RNA, 19 nt, Artificial Sequence
  Synthetic
ggauggaagagaagcugaa

SEQ ID NO: 994 - RNA, 19 nt, Artificial Sequence
  Synthetic
ccaaaggcuuccugauuga

SEQ ID NO: 995 - RNA, 19 nt, Artificial Sequence
  Synthetic
gagaagaguuugagcgacg

SEQ ID NO: 996 - RNA, 19 nt, Artificial Sequence
  Synthetic
gcacuaaaggaauuucuaa

SEQ ID NO: 997 - RNA, 19 nt, Artificial Sequence
  Synthetic
ggaagagaagcugaagaaa

SEQ ID NO: 998 - RNA, 19 nt, Artificial Sequence
  Synthetic
gcauugugcgcaaggucaa

SEQ ID NO: 999 - RNA, 19 nt, Artificial Sequence
  Synthetic
aggagaagaguuugagcga

SEQ ID NO: 1000 - RNA, 19 nt, Artificial Sequence
  Synthetic
gaaugaaauccgaacaguu

SEQ ID NO: 1001 - RNA, 19 nt, Artificial Sequence
  Synthetic
gugcagaaguauggcuaca

SEQ ID NO: 1002 - RNA, 19 nt, Artificial Sequence
  Synthetic
gggaggugcagcaaggaga

SEQ ID NO: 1003 - RNA, 19 nt, Artificial Sequence
  Synthetic
cuaugagaaacguggcauu

SEQ ID NO: 1004 - RNA, 19 nt, Artificial Sequence
  Synthetic
guucagcggaguagcagaa

SEQ ID NO: 1005 - RNA, 19 nt, Artificial Sequence
  Synthetic
cuugaaacguggagagacc

SEQ ID NO: 1006 - RNA, 19 nt, Artificial Sequence
  Synthetic
uggagacaguguuggacau

SEQ ID NO: 1007 - RNA, 19 nt, Artificial Sequence
  Synthetic
ggaguugauucaugugcuu

SEQ ID NO: 1008 - RNA, 19 nt, Artificial Sequence
  Synthetic
aagagaagcugaagaaaac

SEQ ID NO: 1009 - RNA, 19 nt, Artificial Sequence
  Synthetic
gcacccagugugagaagau

SEQ ID NO: 1010 - RNA, 19 nt, Artificial Sequence
  Synthetic
acgacaaugaggagaccau

SEQ ID NO: 1011 - RNA, 19 nt, Artificial Sequence
  Synthetic
ggaccuggcuggaaggaaa

SEQ ID NO: 1012 - RNA, 19 nt, Artificial Sequence
  Synthetic
ggguagaaauagacacaau

SEQ ID NO: 1013 - RNA, 19 nt, Artificial Sequence
  Synthetic
gaccaagaguacaggaaau

SEQ ID NO: 1014 - RNA, 19 nt, Artificial Sequence
  Synthetic
cugggaaacuggugaguga

SEQ ID NO: 1015 - RNA, 19 nt, Artificial Sequence
  Synthetic
gagcaaguguccuaagcua

SEQ ID NO: 1016 - RNA, 19 nt, Artificial Sequence
  Synthetic
caaaagagcccaugaaaga

SEQ ID NO: 1017 - RNA, 19 nt, Artificial Sequence
  Synthetic
aggaauacuuggaacaaca

SEQ ID NO: 1018 - RNA, 19 nt, Artificial Sequence
  Synthetic
ccagauauacacagaaaga

SEQ ID NO: 1019 - RNA, 19 nt, Artificial Sequence
  Synthetic
gauguaagguguauucaua

SEQ ID NO: 1020 - RNA, 19 nt, Artificial Sequence
  Synthetic
gaacagggagcuuugauua

SEQ ID NO: 1021 - RNA, 19 nt, Artificial Sequence
  Synthetic
aacuauggaugcugggaaa

SEQ ID NO: 1022 - RNA, 19 nt, Artificial Sequence
  Synthetic
aggcagaaaugcucgauga

SEQ ID NO: 1023 - RNA, 19 nt, Artificial Sequence
  Synthetic
cuccaaagccacauguaaa

SEQ ID NO: 1024 - RNA, 19 nt, Artificial Sequence
  Synthetic
ucauagaguacuacaggaa

SEQ ID NO: 1025 - RNA, 19 nt, Artificial Sequence
  Synthetic
gguagaaauagacacaaua

SEQ ID NO: 1026 - RNA, 19 nt, Artificial Sequence
  Synthetic
gcaaugggugggaaugaua

SEQ ID NO: 1027 - RNA, 19 nt, Artificial Sequence
  Synthetic
ggaagggaaugaaauggaa

SEQ ID NO: 1028 - RNA, 19 nt, Artificial Sequence
  Synthetic
gaagggaaugaaauggaaa

SEQ ID NO: 1029 - RNA, 19 nt, Artificial Sequence
  Synthetic
gcucaacaaaucaagcaaa

SEQ ID NO: 1030 - RNA, 19 nt, Artificial Sequence
  Synthetic
ggaaucggguuuucauuua

SEQ ID NO: 1031 - RNA, 19 nt, Artificial Sequence
  Synthetic
cauguaaagacuugguuau

SEQ ID NO: 1032 - RNA, 19 nt, Artificial Sequence
  Synthetic
guaaagacuugguuauguu

SEQ ID NO: 1033 - RNA, 19 nt, Artificial Sequence
  Synthetic
gcaacagacauuggauaaa

SEQ ID NO: 1034 - RNA, 19 nt, Artificial Sequence
  Synthetic
caagaguacaggaaaucaa

SEQ ID NO: 1035 - RNA, 19 nt, Artificial Sequence
  Synthetic
gaaagagauguaaggugua

SEQ ID NO: 1036 - RNA, 19 nt, Artificial Sequence
  Synthetic
ggagaagaggaaagagaag

SEQ ID NO: 1037 - RNA, 19 nt, Artificial Sequence
  Synthetic
auggagaagaggaaagaga

SEQ ID NO: 1038 - RNA, 19 nt, Artificial Sequence
  Synthetic
cagaaaugcucgaugaccu

SEQ ID NO: 1039 - RNA, 19 nt, Artificial Sequence
  Synthetic
ggugagugaugaaauggua

SEQ ID NO: 1040 - RNA, 19 nt, Artificial Sequence
  Synthetic
gaagggacucuuuuaaaua

SEQ ID NO: 1041 - RNA, 19 nt, Artificial Sequence
  Synthetic
aguacaaagacguggcaaa

SEQ ID NO: 1042 - RNA, 19 nt, Artificial Sequence
  Synthetic
gcaaagcaguauauagaga

SEQ ID NO: 1043 - RNA, 19 nt, Artificial Sequence
  Synthetic
acaaaugaguagaaagagu

SEQ ID NO: 1044 - RNA, 19 nt, Artificial Sequence
  Synthetic
uugaaauggugaacugaua

SEQ ID NO: 1045 - RNA, 19 nt, Artificial Sequence
  Synthetic
gcaaguacaguguggauuu

SEQ ID NO: 1046 - RNA, 19 nt, Artificial Sequence
  Synthetic
uggcaaagcaguauauaga

SEQ ID NO: 1047 - RNA, 19 nt, Artificial Sequence
  Synthetic
uagaaagaguucaugaaga

SEQ ID NO: 1048 - RNA, 19 nt, Artificial Sequence
  Synthetic
ccuccuagcggaaggguau

SEQ ID NO: 1049 - RNA, 19 nt, Artificial Sequence
  Synthetic
ggguauauaaccuggacuu

SEQ ID NO: 1050 - RNA, 19 nt, Artificial Sequence
  Synthetic
cacaaaggcuguugaacca

SEQ ID NO: 1051 - RNA, 19 nt, Artificial Sequence
  Synthetic
ggaagaaccaggaagaugu

SEQ ID NO: 1052 - RNA, 19 nt, Artificial Sequence
  Synthetic
auggugaacugauaggaaa

SEQ ID NO: 1053 - RNA, 19 nt, Artificial Sequence
  Synthetic
ugauaaacccgaagcaguu

SEQ ID NO: 1054 - RNA, 19 nt, Artificial Sequence
  Synthetic
gugagauggcaaagcagua

SEQ ID NO: 1055 - RNA, 19 nt, Artificial Sequence
  Synthetic
aggaagauguggucauuca

SEQ ID NO: 1056 - RNA, 19 nt, Artificial Sequence
  Synthetic
ggaaaacaaaugaguagaa

SEQ ID NO: 1057 - RNA, 19 nt, Artificial Sequence
  Synthetic
aagccgaagcccuggacaa

SEQ ID NO: 1058 - RNA, 19 nt, Artificial Sequence
  Synthetic
gaacugagcuaugaagaga

SEQ ID NO: 1059 - RNA, 19 nt, Artificial Sequence
  Synthetic
agaaagaguucaugaagag

SEQ ID NO: 1060 - RNA, 19 nt, Artificial Sequence
  Synthetic
ggaacggagacgaacaaaa

SEQ ID NO: 1061 - RNA, 19 nt, Artificial Sequence
  Synthetic
ggcuaagacaguacaaaga

SEQ ID NO: 1062 - RNA, 19 nt, Artificial Sequence
  Synthetic
uauauaaccuggacuucaa

SEQ ID NO: 1063 - RNA, 19 nt, Artificial Sequence
  Synthetic
ccagcaggaggaugauaaa

SEQ ID NO: 1064 - RNA, 19 nt, Artificial Sequence
  Synthetic
gugaaauugaagcuacuua

SEQ ID NO: 1065 - RNA, 19 nt, Artificial Sequence
  Synthetic
ucaaaaggcuggucaccua

SEQ ID NO: 1066 - RNA, 19 nt, Artificial Sequence
  Synthetic
ggacaaaaucugugaagug

SEQ ID NO: 1067 - RNA, 19 nt, Artificial Sequence
  Synthetic
gaacuuuggucuccagcau

SEQ ID NO: 1068 - RNA, 19 nt, Artificial Sequence
  Synthetic
cgggagaacaucaaggcca

SEQ ID NO: 1069 - RNA, 19 nt, Artificial Sequence
  Synthetic
gaguagaaagaguucauga

SEQ ID NO: 1070 - RNA, 19 nt, Artificial Sequence
  Synthetic
ggggagggguugucuuaaa

SEQ ID NO: 1071 - RNA, 19 nt, Artificial Sequence
  Synthetic
gcaccaaaguugaaugaau

SEQ ID NO: 1072 - RNA, 19 nt, Artificial Sequence
  Synthetic
guaaacagguguaccaaua

SEQ ID NO: 1073 - RNA, 19 nt, Artificial Sequence
  Synthetic
ucaagagacuaaaggcuua

SEQ ID NO: 1074 - RNA, 19 nt, Artificial Sequence
  Synthetic
uaugagagauggaggaaaa

SEQ ID NO: 1075 - RNA, 19 nt, Artificial Sequence
  Synthetic
cugaaugacuguucuaaua

SEQ ID NO: 1076 - RNA, 19 nt, Artificial Sequence
  Synthetic
aaagaaagcaacuggauuu

SEQ ID NO: 1077 - RNA, 19 nt, Artificial Sequence
  Synthetic
ggaccaggaaagugaguuu

SEQ ID NO: 1078 - RNA, 19 nt, Artificial Sequence
  Synthetic
caccaaaguugaaugaauu

SEQ ID NO: 1079 - RNA, 19 nt, Artificial Sequence
  Synthetic
gcaacuggauuuacagauu

SEQ ID NO: 1080 - RNA, 19 nt, Artificial Sequence
  Synthetic
ggcagaagcccuagauaga

SEQ ID NO: 1081 - RNA, 19 nt, Artificial Sequence
  Synthetic
uggcauaaauagcaaucaa

SEQ ID NO: 1082 - RNA, 19 nt, Artificial Sequence
  Synthetic
ccagaaagcuucaguuacu

SEQ ID NO: 1083 - RNA, 19 nt, Artificial Sequence
  Synthetic
gacuaaaggcuuaugaaga

SEQ ID NO: 1084 - RNA, 19 nt, Artificial Sequence
  Synthetic
cacagaaauuggcguguua

SEQ ID NO: 1085 - RNA, 19 nt, Artificial Sequence
  Synthetic
gaacagaaaccaacaagau

SEQ ID NO: 1086 - RNA, 19 nt, Artificial Sequence
  Synthetic
agaucgacacagugauuaa

SEQ ID NO: 1087 - RNA, 19 nt, Artificial Sequence
  Synthetic
ggaaacacuucauucuuua

SEQ ID NO: 1088 - RNA, 19 nt, Artificial Sequence
  Synthetic
gaaagaaagcaacuggauu

SEQ ID NO: 1089 - RNA, 19 nt, Artificial Sequence
  Synthetic
ggagaaauguguguaacua

SEQ ID NO: 1090 - RNA, 19 nt, Artificial Sequence
  Synthetic
cuacacacuucgagcugaa

SEQ ID NO: 1091 - RNA, 19 nt, Artificial Sequence
  Synthetic
cuuaugaagaccaaacaaa

SEQ ID NO: 1092 - RNA, 19 nt, Artificial Sequence
  Synthetic
caaaugauucggauacuaa

SEQ ID NO: 1093 - RNA, 19 nt, Artificial Sequence
  Synthetic
ccuaagacuucuaguaugu

SEQ ID NO: 1094 - RNA, 19 nt, Artificial Sequence
  Synthetic
acgguuaucaagagacuaa

SEQ ID NO: 1095 - RNA, 19 nt, Artificial Sequence
  Synthetic
gagaaauguguguaacuau

SEQ ID NO: 1096 - RNA, 19 nt, Artificial Sequence
  Synthetic
caugauagguuaacaagga

SEQ ID NO: 1097 - RNA, 19 nt, Artificial Sequence
  Synthetic
acagaaaccaacaagauuu

SEQ ID NO: 1098 - RNA, 19 nt, Artificial Sequence
  Synthetic
agauuuggcccuauguaua

SEQ ID NO: 1099 - RNA, 19 nt, Artificial Sequence
  Synthetic
ccuuugaggucauuaaaca

SEQ ID NO: 1100 - RNA, 19 nt, Artificial Sequence
  Synthetic
cucaauggcuucugaauga

SEQ ID NO: 1101 - RNA, 19 nt, Artificial Sequence
  Synthetic
gugaaaagcugguggaaaa

SEQ ID NO: 1102 - RNA, 19 nt, Artificial Sequence
  Synthetic
ccgaagauccaguagaaua

SEQ ID NO: 1103 - RNA, 19 nt, Artificial Sequence
  Synthetic
aaucagagacucaaagaaa

SEQ ID NO: 1104 - RNA, 19 nt, Artificial Sequence
  Synthetic
cagaguugauugaggagua

SEQ ID NO: 1105 - RNA, 19 nt, Artificial Sequence
  Synthetic
ucauggaagauuugagaaa

SEQ ID NO: 1106 - RNA, 19 nt, Artificial Sequence
  Synthetic
gcauuaaaccagugaaguu

SEQ ID NO: 1107 - RNA, 19 nt, Artificial Sequence
  Synthetic
caagauaaaugcagaggga

SEQ ID NO: 1108 - RNA, 19 nt, Artificial Sequence
  Synthetic
gauaauuacaacuggagaa

SEQ ID NO: 1109 - RNA, 19 nt, Artificial Sequence
  Synthetic
ccacaggaaacaacaauua

SEQ ID NO: 1110 - RNA, 19 nt, Artificial Sequence
  Synthetic
aguaaagacucgaaacuga

SEQ ID NO: 1111 - RNA, 19 nt, Artificial Sequence
  Synthetic
agauaaaugcagagggaac

SEQ ID NO: 1112 - RNA, 19 nt, Artificial Sequence
  Synthetic
ccauaagguggguugauua

SEQ ID NO: 1113 - RNA, 19 nt, Artificial Sequence
  Synthetic
aauaggaaauggagucuua

SEQ ID NO: 1114 - RNA, 19 nt, Artificial Sequence
  Synthetic
cuaaaggucaugaggguuu

SEQ ID NO: 1115 - RNA, 19 nt, Artificial Sequence
  Synthetic
ugugagaggugucuggaaa

SEQ ID NO: 1116 - RNA, 19 nt, Artificial Sequence
  Synthetic
cggcagacaccaugaccaa

SEQ ID NO: 1117 - RNA, 19 nt, Artificial Sequence
  Synthetic
gggcauuguuauugaugga

SEQ ID NO: 1118 - RNA, 19 nt, Artificial Sequence
  Synthetic
agacugauaucguaaacua

SEQ ID NO: 1119 - RNA, 19 nt, Artificial Sequence
  Synthetic
gaucagagacauuauggaa

SEQ ID NO: 1120 - RNA, 19 nt, Artificial Sequence
  Synthetic
caaauugaucagagacauu

SEQ ID NO: 1121 - RNA, 19 nt, Artificial Sequence
  Synthetic
ccaacgaugccaaggagua

SEQ ID NO: 1122 - RNA, 19 nt, Artificial Sequence
  Synthetic
gaagcaaauugaucagaga

SEQ ID NO: 1123 - RNA, 19 nt, Artificial Sequence
  Synthetic
gacaaggugaaaugggaua

SEQ ID NO: 1124 - RNA, 19 nt, Artificial Sequence
  Synthetic
gcgaugaggaugagguguu

SEQ ID NO: 1125 - RNA, 19 nt, Artificial Sequence
  Synthetic
ccagguuagucaucaguaa

SEQ ID NO: 1126 - RNA, 19 nt, Artificial Sequence
  Synthetic
gggcacauaucaaauuaua

SEQ ID NO: 1127 - RNA, 19 nt, Artificial Sequence
  Synthetic
gaaacaacaauuacagaga

SEQ ID NO: 1128 - RNA, 19 nt, Artificial Sequence
  Synthetic
gaaagaagcaaauugauca

SEQ ID NO: 1129 - RNA, 19 nt, Artificial Sequence
  Synthetic
gcaaauaccugaugaagag

SEQ ID NO: 1130 - RNA, 19 nt, Artificial Sequence
  Synthetic
gcccgaagauccaguagaa

SEQ ID NO: 1131 - RNA, 19 nt, Artificial Sequence
  Synthetic
gugcauagcucaugagaca

SEQ ID NO: 1132 - RNA, 19 nt, Artificial Sequence
  Synthetic
aggaagaggaggaggagaa

SEQ ID NO: 1133 - RNA, 19 nt, Artificial Sequence
  Synthetic
ugaagaaauuacagaggaa

SEQ ID NO: 1134 - RNA, 19 nt, Artificial Sequence
  Synthetic
aggaagaggaagaggaaga

SEQ ID NO: 1135 - RNA, 19 nt, Artificial Sequence
  Synthetic
gaaaauacccagagaaaau

SEQ ID NO: 1136 - RNA, 19 nt, Artificial Sequence
  Synthetic
gagaauuacuggaggcuca

SEQ ID NO: 1137 - RNA, 19 nt, Artificial Sequence
  Synthetic
cagaaaauacccagagaaa

SEQ ID NO: 1138 - RNA, 19 nt, Artificial Sequence
  Synthetic
aggcagaagaggagcggaa

SEQ ID NO: 1139 - RNA, 19 nt, Artificial Sequence
  Synthetic
agaagaagucgaagaggaa

SEQ ID NO: 1140 - RNA, 19 nt, Artificial Sequence
  Synthetic
gaagaagauuaucgaagaa

SEQ ID NO: 1141 - RNA, 19 nt, Artificial Sequence
  Synthetic
ugaucuagcaggagugaua

SEQ ID NO: 1142 - RNA, 19 nt, Artificial Sequence
  Synthetic
gggcgagauuccugcauua

SEQ ID NO: 1143 - RNA, 19 nt, Artificial Sequence
  Synthetic
ugaaggagcgugugauaaa

SEQ ID NO: 1144 - RNA, 19 nt, Artificial Sequence
  Synthetic
gagaagaagaagucgaaga

SEQ ID NO: 1145 - RNA, 19 nt, Artificial Sequence
  Synthetic
uuacagaggaagaggaaga

SEQ ID NO: 1146 - RNA, 19 nt, Artificial Sequence
  Synthetic
aaacaggauuuguggaaaa

SEQ ID NO: 1147 - RNA, 19 nt, Artificial Sequence
  Synthetic
gaagauuaucgaagaagaa

SEQ ID NO: 1148 - RNA, 19 nt, Artificial Sequence
  Synthetic
cuaaagaauuggccaagua

SEQ ID NO: 1149 - RNA, 19 nt, Artificial Sequence
  Synthetic
aggaagaggaagaugaaaa

SEQ ID NO: 1150 - RNA, 19 nt, Artificial Sequence
  Synthetic
aagaagaagucgaagagga

SEQ ID NO: 1151 - RNA, 19 nt, Artificial Sequence
  Synthetic
gcauagcucaugagacaaa

SEQ ID NO: 1152 - RNA, 19 nt, Artificial Sequence
  Synthetic
gaauaaacgacuggaggaa

SEQ ID NO: 1153 - RNA, 19 nt, Artificial Sequence
  Synthetic
gcagaaugcaggucaacua

SEQ ID NO: 1154 - RNA, 19 nt, Artificial Sequence
  Synthetic
gaagaaagucucauccuaa

SEQ ID NO: 1155 - RNA, 19 nt, Artificial Sequence
  Synthetic
ccgaagacccuguugauuu

SEQ ID NO: 1156 - RNA, 19 nt, Artificial Sequence
  Synthetic
aagaaauuacagaggaaga

SEQ ID NO: 1157 - RNA, 19 nt, Artificial Sequence
  Synthetic
ucauagaucacgugccaaa

SEQ ID NO: 1158 - RNA, 19 nt, Artificial Sequence
  Synthetic
ucgaagaggaagaggagga

SEQ ID NO: 1159 - RNA, 19 nt, Artificial Sequence
  Synthetic
ggagcagaaugcaggucaa

SEQ ID NO: 1160 - RNA, 19 nt, Artificial Sequence
  Synthetic
gauaaagacauuugugcau

SEQ ID NO: 1161 - RNA, 19 nt, Artificial Sequence
  Synthetic
ggacagaggagcaagguuu

SEQ ID NO: 1162 - RNA, 19 nt, Artificial Sequence
  Synthetic
ccgaggugcuggaggacaa

SEQ ID NO: 1163 - RNA, 19 nt, Artificial Sequence
  Synthetic
cggagaagaacguggugua

SEQ ID NO: 1164 - RNA, 19 nt, Artificial Sequence
  Synthetic
agggaaauguuaaggacuu

SEQ ID NO: 1165 - RNA, 19 nt, Artificial Sequence
  Synthetic
ccaugaagauccucaagaa

SEQ ID NO: 1166 - RNA, 19 nt, Artificial Sequence
  Synthetic
aggaagucaucguggccaa

SEQ ID NO: 1167 - RNA, 19 nt, Artificial Sequence
  Synthetic
gcaaggugauccuggugaa

SEQ ID NO: 1168 - RNA, 19 nt, Artificial Sequence
  Synthetic
ucaagaagcaggaggagga

SEQ ID NO: 1169 - RNA, 19 nt, Artificial Sequence
  Synthetic
accugaagcugcugggcaa

SEQ ID NO: 1170 - RNA, 19 nt, Artificial Sequence
  Synthetic
gagcgggaggaguggacaa

SEQ ID NO: 1171 - RNA, 19 nt, Artificial Sequence
  Synthetic
gagacugacaccagguauu

SEQ ID NO: 1172 - RNA, 19 nt, Artificial Sequence
  Synthetic
cuucuauggcgcugagauu

SEQ ID NO: 1173 - RNA, 19 nt, Artificial Sequence
  Synthetic
gcuacuacgccaugaagau

SEQ ID NO: 1174 - RNA, 19 nt, Artificial Sequence
  Synthetic
ccaugaacgaguuugagua

SEQ ID NO: 1175 - RNA, 19 nt, Artificial Sequence
  Synthetic
ccaaggagaucaugcagca

SEQ ID NO: 1176 - RNA, 19 nt, Artificial Sequence
  Synthetic
ccgaggacgccaaggagau

SEQ ID NO: 1177 - RNA, 19 nt, Artificial Sequence
  Synthetic
cugaagagauggagguguc

SEQ ID NO: 1178 - RNA, 19 nt, Artificial Sequence
  Synthetic
aggaggaggagauggacuu

SEQ ID NO: 1179 - RNA, 19 nt, Artificial Sequence
  Synthetic
aggaggaggaggagaugga

SEQ ID NO: 1180 - RNA, 19 nt, Artificial Sequence
  Synthetic
uuaaggacuucuacagcua

SEQ ID NO: 1181 - RNA, 19 nt, Artificial Sequence
  Synthetic
gcacuaaggccgugucucu

SEQ ID NO: 1182 - RNA, 19 nt, Artificial Sequence
  Synthetic
ucacguagggaaauguuaa

SEQ ID NO: 1183 - RNA, 19 nt, Artificial Sequence
  Synthetic
gcgcagugccagcugauga

SEQ ID NO: 1184 - RNA, 19 nt, Artificial Sequence
  Synthetic
caucacaccaccugaccaa

SEQ ID NO: 1185 - RNA, 19 nt, Artificial Sequence
  Synthetic
ggagcaagguuuaaauuug

SEQ ID NO: 1186 - RNA, 19 nt, Artificial Sequence
  Synthetic
cgacguggcuauugugaag

SEQ ID NO: 1187 - RNA, 19 nt, Artificial Sequence
  Synthetic
ggacaaggacgggcacauu

SEQ ID NO: 1188 - RNA, 19 nt, Artificial Sequence
  Synthetic
gcaagggcacuuucggcaa

SEQ ID NO: 1189 - RNA, 19 nt, Artificial Sequence
  Synthetic
agaagcaggaggaggagga

SEQ ID NO: 1190 - RNA, 19 nt, Artificial Sequence
  Synthetic
gacagaggagcaagguuua

SEQ ID NO: 1191 - RNA, 19 nt, Artificial Sequence
  Synthetic
ccaugaagauccugcgaaa

SEQ ID NO: 1192 - RNA, 19 nt, Artificial Sequence
  Synthetic
cugaggugcuggaggacaa

SEQ ID NO: 1193 - RNA, 19 nt, Artificial Sequence
  Synthetic
guuuuauggugcagagauu

SEQ ID NO: 1194 - RNA, 19 nt, Artificial Sequence
  Synthetic
gcaaagagggcaucaguga

SEQ ID NO: 1195 - RNA, 19 nt, Artificial Sequence
  Synthetic
ccaaggaggucauggagca

SEQ ID NO: 1196 - RNA, 19 nt, Artificial Sequence
  Synthetic
gggcuaaagugaccaugaa

SEQ ID NO: 1197 - RNA, 19 nt, Artificial Sequence
  Synthetic
cuaaagugaccaugaauga

SEQ ID NO: 1198 - RNA, 19 nt, Artificial Sequence
  Synthetic
uggaaguggcggucagcaa

SEQ ID NO: 1199 - RNA, 19 nt, Artificial Sequence
  Synthetic
cagcaaggcacgggcuaaa

SEQ ID NO: 1200 - RNA, 19 nt, Artificial Sequence
  Synthetic
cgacugaggagauggaagu

SEQ ID NO: 1201 - RNA, 19 nt, Artificial Sequence
  Synthetic
caucaagaucacugacuuu

SEQ ID NO: 1202 - RNA, 19 nt, Artificial Sequence
  Synthetic
cagaaugccagcugaugaa

SEQ ID NO: 1203 - RNA, 19 nt, Artificial Sequence
  Synthetic
ccaugaaugacuucgacua

SEQ ID NO: 1204 - RNA, 19 nt, Artificial Sequence
  Synthetic
guacuucgaugaugaauuu

SEQ ID NO: 1205 - RNA, 19 nt, Artificial Sequence
  Synthetic
caagguacuucgaugauga

SEQ ID NO: 1206 - RNA, 19 nt, Artificial Sequence
  Synthetic
gcagaaugccagcugauga

SEQ ID NO: 1207 - RNA, 19 nt, Artificial Sequence
  Synthetic
ugguauaccgcgacaucaa

SEQ ID NO: 1208 - RNA, 19 nt, Artificial Sequence
  Synthetic
acacaagguacuucgauga

SEQ ID NO: 1209 - RNA, 19 nt, Artificial Sequence
  Synthetic
ccacagucaucgagaggac

SEQ ID NO: 1210 - RNA, 19 nt, Artificial Sequence
  Synthetic
gguacuucgaugaugaauu

SEQ ID NO: 1211 - RNA, 19 nt, Artificial Sequence
  Synthetic
gcgaggaccccauggacua

SEQ ID NO: 1212 - RNA, 19 nt, Artificial Sequence
  Synthetic
ggaugaagucgcucacaca

SEQ ID NO: 1213 - RNA, 19 nt, Artificial Sequence
  Synthetic
caugaaugacuucgacuau

SEQ ID NO: 1214 - RNA, 19 nt, Artificial Sequence
  Synthetic
gcgacaucaagcuggaaaa

SEQ ID NO: 1215 - RNA, 19 nt, Artificial Sequence
  Synthetic
gugaauacaucaagaccug

SEQ ID NO: 1216 - RNA, 19 nt, Artificial Sequence
  Synthetic
acgagagggaggaguggau

SEQ ID NO: 1217 - RNA, 19 nt, Artificial Sequence
  Synthetic
aggaagucaucauugccaa

SEQ ID NO: 1218 - RNA, 19 nt, Artificial Sequence
  Synthetic
gcuggaggacaaugacuau

SEQ ID NO: 1219 - RNA, 19 nt, Artificial Sequence
  Synthetic
gcgaaaggaagucaucauu

SEQ ID NO: 1220 - RNA, 19 nt, Artificial Sequence
  Synthetic
ggacaaagauggccacaua

SEQ ID NO: 1221 - RNA, 19 nt, Artificial Sequence
  Synthetic
ggcaagaagaggagagaau

SEQ ID NO: 1222 - RNA, 19 nt, Artificial Sequence
  Synthetic
cuuaaagggucuuaugaaa

SEQ ID NO: 1223 - RNA, 19 nt, Artificial Sequence
  Synthetic
ggcaagauguauaugauaa

SEQ ID NO: 1224 - RNA, 19 nt, Artificial Sequence
  Synthetic
ugauaauauaggagaggaa

SEQ ID NO: 1225 - RNA, 19 nt, Artificial Sequence
  Synthetic
caaccaggaccaugagaaa

SEQ ID NO: 1226 - RNA, 19 nt, Artificial Sequence
  Synthetic
accaagaacugaaggcaua

SEQ ID NO: 1227 - RNA, 19 nt, Artificial Sequence
  Synthetic
acaaauagcuguugacguu

SEQ ID NO: 1228 - RNA, 19 nt, Artificial Sequence
  Synthetic
gguggauacuguagaagaa

SEQ ID NO: 1229 - RNA, 19 nt, Artificial Sequence
  Synthetic
gagaagagaugcugccauu

SEQ ID NO: 1230 - RNA, 19 nt, Artificial Sequence
  Synthetic
cagagguguuagaagauaa

SEQ ID NO: 1231 - RNA, 19 nt, Artificial Sequence
  Synthetic
uuucagggcucuugauaaa

SEQ ID NO: 1232 - RNA, 19 nt, Artificial Sequence
  Synthetic
guagacagguauaaugaua

SEQ ID NO: 1233 - RNA, 19 nt, Artificial Sequence
  Synthetic
ugaagaauguagacaggua

SEQ ID NO: 1234 - RNA, 19 nt, Artificial Sequence
  Synthetic
cgauguuaccauugugaaa

SEQ ID NO: 1235 - RNA, 19 nt, Artificial Sequence
  Synthetic
caagaagaggagagaauga

SEQ ID NO: 1236 - RNA, 19 nt, Artificial Sequence
  Synthetic
uguagauacuccagaggaa

SEQ ID NO: 1237 - RNA, 19 nt, Artificial Sequence
  Synthetic
cgagagaaggcaaguggaa

SEQ ID NO: 1238 - RNA, 19 nt, Artificial Sequence
  Synthetic
agaaugaauuguaguccaa

SEQ ID NO: 1239 - RNA, 19 nt, Artificial Sequence
  Synthetic
agagaaggcaaguggaaaa

SEQ ID NO: 1240 - RNA, 19 nt, Artificial Sequence
  Synthetic
gcucugaaauggaauauau

SEQ ID NO: 1241 - RNA, 19 nt, Artificial Sequence
  Synthetic
ggaaagggaagaauggaca

SEQ ID NO: 1242 - RNA, 19 nt, Artificial Sequence
  Synthetic
acaaagauggccacauaaa

SEQ ID NO: 1243 - RNA, 19 nt, Artificial Sequence
  Synthetic
gcacacacucuaacugaaa

SEQ ID NO: 1244 - RNA, 19 nt, Artificial Sequence
  Synthetic
gagacagauacuagauauu

SEQ ID NO: 1245 - RNA, 19 nt, Artificial Sequence
  Synthetic
ucaaguaacaucugagaca

SEQ ID NO: 1246 - RNA, 19 nt, Artificial Sequence
  Synthetic
ugacuauggccgagcagua

SEQ ID NO: 1247 - RNA, 19 nt, Artificial Sequence
  Synthetic
gcaaagaagggaucacaga

SEQ ID NO: 1248 - RNA, 19 nt, Artificial Sequence
  Synthetic
gagagaaggcaaguggaaa

SEQ ID NO: 1249 - RNA, 19 nt, Artificial Sequence
  Synthetic
cauuaaauuuccucgaaca

SEQ ID NO: 1250 - RNA, 19 nt, Artificial Sequence
  Synthetic
cagagagacuggagaauaa

SEQ ID NO: 1251 - RNA, 19 nt, Artificial Sequence
  Synthetic
uggcaaggcugcaaagaaa

SEQ ID NO: 1252 - RNA, 19 nt, Artificial Sequence
  Synthetic
ggucauagcuccuuggaau

SEQ ID NO: 1253 - RNA, 19 nt, Artificial Sequence
  Synthetic
ggacaaggauccagagcca

SEQ ID NO: 1254 - RNA, 19 nt, Artificial Sequence
  Synthetic
gaacaaugugauagaagaa

SEQ ID NO: 1255 - RNA, 19 nt, Artificial Sequence
  Synthetic
ggagguggcuggaaugaua

SEQ ID NO: 1256 - RNA, 19 nt, Artificial Sequence
  Synthetic
gggaaaggcgggaagaaca

SEQ ID NO: 1257 - RNA, 19 nt, Artificial Sequence
  Synthetic
ggacagugcuccagggaag

SEQ ID NO: 1258 - RNA, 19 nt, Artificial Sequence
  Synthetic
uggaagaggaagagaaagu

SEQ ID NO: 1259 - RNA, 19 nt, Artificial Sequence
  Synthetic
uggaggaggcggaggauau

SEQ ID NO: 1260 - RNA, 19 nt, Artificial Sequence
  Synthetic
gaacggaaauaaaggaguu

SEQ ID NO: 1261 - RNA, 19 nt, Artificial Sequence
  Synthetic
ggaagugggcagagaggga

SEQ ID NO: 1262 - RNA, 19 nt, Artificial Sequence
  Synthetic
uguggaagaggaagagaaa

SEQ ID NO: 1263 - RNA, 19 nt, Artificial Sequence
  Synthetic
ccuuggugcuaguggagaa

SEQ ID NO: 1264 - RNA, 19 nt, Artificial Sequence
  Synthetic
gagagaacaaugugauaga

SEQ ID NO: 1265 - RNA, 19 nt, Artificial Sequence
  Synthetic
gggcgagcuacuauagaaa

SEQ ID NO: 1266 - RNA, 19 nt, Artificial Sequence
  Synthetic
ccugaaagccacaagguca

SEQ ID NO: 1267 - RNA, 19 nt, Artificial Sequence
  Synthetic
gagagggaacggaaauaaa

SEQ ID NO: 1268 - RNA, 19 nt, Artificial Sequence
  Synthetic
gcccagaugugguugcaua

SEQ ID NO: 1269 - RNA, 19 nt, Artificial Sequence
  Synthetic
gaacugcagugaaggaaca

SEQ ID NO: 1270 - RNA, 19 nt, Artificial Sequence
  Synthetic
gaauaauccuauagcaaag

SEQ ID NO: 1271 - RNA, 19 nt, Artificial Sequence
  Synthetic
gacaagauccugcagaaua

SEQ ID NO: 1272 - RNA, 19 nt, Artificial Sequence
  Synthetic
agaacaaugugauagaaga

SEQ ID NO: 1273 - RNA, 19 nt, Artificial Sequence
  Synthetic
ggaagugaauauuaagcau

SEQ ID NO: 1274 - RNA, 19 nt, Artificial Sequence
  Synthetic
uagcaaagaaggagccaca

SEQ ID NO: 1275 - RNA, 19 nt, Artificial Sequence
  Synthetic
agggagaagaugagagcca

SEQ ID NO: 1276 - RNA, 19 nt, Artificial Sequence
  Synthetic
ccauuagcggagaggacaa

SEQ ID NO: 1277 - RNA, 19 nt, Artificial Sequence
  Synthetic
ggacauugccuguggcugu

SEQ ID NO: 1278 - RNA, 19 nt, Artificial Sequence
  Synthetic
gagaauaacuccucgguuc

SEQ ID NO: 1279 - RNA, 19 nt, Artificial Sequence
  Synthetic
ccgcuuugccgauagaaua

SEQ ID NO: 1280 - RNA, 19 nt, Artificial Sequence
  Synthetic
ggaagaggaaggaaggaaa

SEQ ID NO: 1281 - RNA, 19 nt, Artificial Sequence
  Synthetic
gugugaaacuugugccaua

SEQ ID NO: 1282 - RNA, 19 nt, Artificial Sequence
  Synthetic
gcacaugaaugaacaggaa

SEQ ID NO: 1283 - RNA, 19 nt, Artificial Sequence
  Synthetic
guacauacacacuuagaaa

SEQ ID NO: 1284 - RNA, 19 nt, Artificial Sequence
  Synthetic
gaaaagagcaggugaucaa

SEQ ID NO: 1285 - RNA, 19 nt, Artificial Sequence
  Synthetic
uagaaggcauauugaguua

SEQ ID NO: 1286 - RNA, 19 nt, Artificial Sequence
  Synthetic
ggacacagaguaaugaaua

SEQ ID NO: 1287 - RNA, 19 nt, Artificial Sequence
  Synthetic
guccaaaucuugugauaau

SEQ ID NO: 1288 - RNA, 19 nt, Artificial Sequence
  Synthetic
cagaaacagcaaauagaua

SEQ ID NO: 1289 - RNA, 19 nt, Artificial Sequence
  Synthetic
gauaguacauguuagcaua

SEQ ID NO: 1290 - RNA, 19 nt, Artificial Sequence
  Synthetic
ugagaaagguuguuuguga

SEQ ID NO: 1291 - RNA, 19 nt, Artificial Sequence
  Synthetic
ggaaggaaauauuuugaga

SEQ ID NO: 1292 - RNA, 19 nt, Artificial Sequence
  Synthetic
cuacagacgguaucagaaa

SEQ ID NO: 1293 - RNA, 19 nt, Artificial Sequence
  Synthetic
cugcaaagccuaaugauga

SEQ ID NO: 1294 - RNA, 19 nt, Artificial Sequence
  Synthetic
gaagaaugcucaugauagu

SEQ ID NO: 1295 - RNA, 19 nt, Artificial Sequence
  Synthetic
gaacacuuccaaagauuaa

SEQ ID NO: 1296 - RNA, 19 nt, Artificial Sequence
  Synthetic
gaagaggaaggaaggaaau

SEQ ID NO: 1297 - RNA, 19 nt, Artificial Sequence
  Synthetic
gcaacaagauccugagaaa

SEQ ID NO: 1298 - RNA, 19 nt, Artificial Sequence
  Synthetic
ccugaaagcuuuacagaaa

SEQ ID NO: 1299 - RNA, 19 nt, Artificial Sequence
  Synthetic
gauuacagcaugugaauua

SEQ ID NO: 1300 - RNA, 19 nt, Artificial Sequence
  Synthetic
ccuuauagcccauuggaua

SEQ ID NO: 1301 - RNA, 19 nt, Artificial Sequence
  Synthetic
caaggaaacaucagaauua

SEQ ID NO: 1302 - RNA, 19 nt, Artificial Sequence
  Synthetic
ccugaaggaaugagugaaa

SEQ ID NO: 1303 - RNA, 19 nt, Artificial Sequence
  Synthetic
gcacagaguacuaugacaa

SEQ ID NO: 1304 - RNA, 19 nt, Artificial Sequence
  Synthetic
ccaaguagaaauaggaaga

SEQ ID NO: 1305 - RNA, 19 nt, Artificial Sequence
  Synthetic
aagcauggacagaggcaua

SEQ ID NO: 1306 - RNA, 19 nt, Artificial Sequence
  Synthetic
aggaaugagugaaacuuua

SEQ ID NO: 1307 - RNA, 19 nt, Artificial Sequence
  Synthetic
aguaaauagugaccgauua

SEQ ID NO: 1308 - RNA, 19 nt, Artificial Sequence
  Synthetic
gagaaaaggccaucagcaa

SEQ ID NO: 1309 - RNA, 19 nt, Artificial Sequence
  Synthetic
guccagaacuacugagaca

SEQ ID NO: 1310 - RNA, 19 nt, Artificial Sequence
  Synthetic
gguauaaugugaagucaga

SEQ ID NO: 1311 - RNA, 19 nt, Artificial Sequence
  Synthetic
ggacugagccagaauguga

SEQ ID NO: 1312 - RNA, 19 nt, Artificial Sequence
  Synthetic
ggacagaggcauagggcug

SEQ ID NO: 1313 - RNA, 19 nt, Artificial Sequence
  Synthetic
caaucagaauccagaauga

SEQ ID NO: 1314 - RNA, 19 nt, Artificial Sequence
  Synthetic
ucaaacagaugaaagaaga

SEQ ID NO: 1315 - RNA, 19 nt, Artificial Sequence
  Synthetic
ggauauaucugcaucuuga

SEQ ID NO: 1316 - RNA, 19 nt, Artificial Sequence
  Synthetic
caaugaagaacgccugaaa

SEQ ID NO: 1317 - RNA, 19 nt, Artificial Sequence
  Synthetic
gaagaggauuugacaacuu

SEQ ID NO: 1318 - RNA, 19 nt, Artificial Sequence
  Synthetic
agguguagacucugggauu

SEQ ID NO: 1319 - RNA, 19 nt, Artificial Sequence
  Synthetic
caaacagaugaaagaagaa

SEQ ID NO: 1320 - RNA, 19 nt, Artificial Sequence
  Synthetic
ccuauauacuugacacuuu

SEQ ID NO: 1321 - RNA, 19 nt, Artificial Sequence
  Synthetic
gaacacugguaacuauaaa

SEQ ID NO: 1322 - RNA, 19 nt, Artificial Sequence
  Synthetic
ccgugagaggguugaacua

SEQ ID NO: 1323 - RNA, 19 nt, Artificial Sequence
  Synthetic
guggcugaguccagaacua

SEQ ID NO: 1324 - RNA, 19 nt, Artificial Sequence
  Synthetic
uaaucuagcuagugucauu

SEQ ID NO: 1325 - RNA, 19 nt, Artificial Sequence
  Synthetic
ugugugaacuaaagugauu

SEQ ID NO: 1326 - RNA, 19 nt, Artificial Sequence
  Synthetic
agaugaaagaagaaagcca

SEQ ID NO: 1327 - RNA, 19 nt, Artificial Sequence
  Synthetic
cagaauaaauggacaacua

SEQ ID NO: 1328 - RNA, 19 nt, Artificial Sequence
  Synthetic
ggacauaaacuaagucuaa

SEQ ID NO: 1329 - RNA, 19 nt, Artificial Sequence
  Synthetic
cccagaaguucaagaguaa

SEQ ID NO: 1330 - RNA, 19 nt, Artificial Sequence
  Synthetic
ccaaagagacacugacauu

SEQ ID NO: 1331 - RNA, 19 nt, Artificial Sequence
  Synthetic
cuaagaagcuucaaaucua

SEQ ID NO: 1332 - RNA, 19 nt, Artificial Sequence
  Synthetic
ggaagaaaauucaguggaa

SEQ ID NO: 1333 - RNA, 19 nt, Artificial Sequence
  Synthetic
gcccagaaguucaagagua

SEQ ID NO: 1334 - RNA, 19 nt, Artificial Sequence
  Synthetic
gguuauugcuauugucauu

SEQ ID NO: 1335 - RNA, 19 nt, Artificial Sequence
  Synthetic
gguuuucaguggaggaaga

SEQ ID NO: 1336 - RNA, 19 nt, Artificial Sequence
  Synthetic
uagcagaauaaauggacaa

SEQ ID NO: 1337 - RNA, 19 nt, Artificial Sequence
  Synthetic
uugaaauguuccaggguca

SEQ ID NO: 1338 - RNA, 19 nt, Artificial Sequence
  Synthetic
gaugaggagucuuuguuua

SEQ ID NO: 1339 - RNA, 19 nt, Artificial Sequence
  Synthetic
ccucauaaugucagacuuu

SEQ ID NO: 1340 - RNA, 19 nt, Artificial Sequence
  Synthetic
guacauaauaguggaagaa

SEQ ID NO: 1341 - RNA, 19 nt, Artificial Sequence
  Synthetic
gcucaaacuggcugauuuu

SEQ ID NO: 1342 - RNA, 19 nt, Artificial Sequence
  Synthetic
ucaccuaugaccuggaaua

SEQ ID NO: 1343 - RNA, 19 nt, Artificial Sequence
  Synthetic
ccacggaguaacagugauu

SEQ ID NO: 1344 - RNA, 19 nt, Artificial Sequence
  Synthetic
aggaagaggaucugaggca

SEQ ID NO: 1345 - RNA, 19 nt, Artificial Sequence
  Synthetic
uugaacagcuggagaaaau

SEQ ID NO: 1346 - RNA, 19 nt, Artificial Sequence
  Synthetic
guucaaggcaauaguacau

SEQ ID NO: 1347 - RNA, 19 nt, Artificial Sequence
  Synthetic
guggaagguuauugcuauu

SEQ ID NO: 1348 - RNA, 19 nt, Artificial Sequence
  Synthetic
gcugggagccacugaauau

SEQ ID NO: 1349 - RNA, 19 nt, Artificial Sequence
  Synthetic
aguaaaaggccacggagua

SEQ ID NO: 1350 - RNA, 19 nt, Artificial Sequence
  Synthetic
cagaaguucaagaguaaaa

SEQ ID NO: 1351 - RNA, 19 nt, Artificial Sequence
  Synthetic
ugacauaauccacaccaaa

SEQ ID NO: 1352 - RNA, 19 nt, Artificial Sequence
  Synthetic
guuucaggagugaggcuaa

SEQ ID NO: 1353 - RNA, 19 nt, Artificial Sequence
  Synthetic
guaaaaggccacggaguaa

SEQ ID NO: 1354 - RNA, 19 nt, Artificial Sequence
  Synthetic
ggugaaggcucuuaugcga

SEQ ID NO: 1355 - RNA, 19 nt, Artificial Sequence
  Synthetic
cuucaaaucuaacuccaua

SEQ ID NO: 1356 - RNA, 19 nt, Artificial Sequence
  Synthetic
ggaguuucuugcacugaua

SEQ ID NO: 1357 - RNA, 19 nt, Artificial Sequence
  Synthetic
gcacaaagacacugggaga

SEQ ID NO: 1358 - RNA, 19 nt, Artificial Sequence
  Synthetic
caccagagcucuuggacaa

SEQ ID NO: 1359 - RNA, 19 nt, Artificial Sequence
  Synthetic
gcagaauggccaauauaaa

SEQ ID NO: 1360 - RNA, 19 nt, Artificial Sequence
  Synthetic
ggacaagacucuggaccua

SEQ ID NO: 1361 - RNA, 19 nt, Artificial Sequence
  Synthetic
guacgaacuuccaggccua

SEQ ID NO: 1362 - RNA, 19 nt, Artificial Sequence
  Synthetic
cgaaagaacuacagagugc

SEQ ID NO: 1363 - RNA, 19 nt, Artificial Sequence
  Synthetic
guacaugccaacauaaaua

SEQ ID NO: 1364 - RNA, 19 nt, Artificial Sequence
  Synthetic
ccgggcagcugcaaggaaa

SEQ ID NO: 1365 - RNA, 19 nt, Artificial Sequence
  Synthetic
gggcacagguggaaaugca

SEQ ID NO: 1366 - RNA, 19 nt, Artificial Sequence
  Synthetic
gaagauggaucgugugcca

SEQ ID NO: 1367 - RNA, 19 nt, Artificial Sequence
  Synthetic
cuagaagacuguugggaug

SEQ ID NO: 1368 - RNA, 19 nt, Artificial Sequence
  Synthetic
augcaaggaugccgagaca

SEQ ID NO: 1369 - RNA, 19 nt, Artificial Sequence
  Synthetic
gcaaggaugccgagacagu

SEQ ID NO: 1370 - RNA, 19 nt, Artificial Sequence
  Synthetic
gcugcuagauacaggcaca

SEQ ID NO: 1371 - RNA, 19 nt, Artificial Sequence
  Synthetic
ccuagaagacuguugggau

SEQ ID NO: 1372 - RNA, 19 nt, Artificial Sequence
  Synthetic
uggcccugcuacagcgaaa

SEQ ID NO: 1373 - RNA, 19 nt, Artificial Sequence
  Synthetic
ugagggagcuccuagaaga

SEQ ID NO: 1374 - RNA, 19 nt, Artificial Sequence
  Synthetic
ccgagacagugaugagcca

SEQ ID NO: 1375 - RNA, 19 nt, Artificial Sequence
  Synthetic
gggagagcugcuagauaca

SEQ ID NO: 1376 - RNA, 19 nt, Artificial Sequence
  Synthetic
gaggugagccagugccaga

SEQ ID NO: 1377 - RNA, 19 nt, Artificial Sequence
  Synthetic
gcaccagagcucuuggaca

SEQ ID NO: 1378 - RNA, 19 nt, Artificial Sequence
  Synthetic
ggaaggaggucaugcagug

SEQ ID NO: 1379 - RNA, 19 nt, Artificial Sequence
  Synthetic
ccacuucagcguucagcaa

SEQ ID NO: 1380 - RNA, 19 nt, Artificial Sequence
  Synthetic
ggcagaauggccaauauaa

SEQ ID NO: 1381 - RNA, 19 nt, Artificial Sequence
  Synthetic
cugggagagcugcuagaua

SEQ ID NO: 1382 - RNA, 19 nt, Artificial Sequence
  Synthetic
guacauggcaccagagcuc

SEQ ID NO: 1383 - RNA, 19 nt, Artificial Sequence
  Synthetic
ccuccgacgagcugauauu

SEQ ID NO: 1384 - RNA, 19 nt, Artificial Sequence
  Synthetic
ggaaaugcaaggaugccga

SEQ ID NO: 1385 - RNA, 19 nt, Artificial Sequence
  Synthetic
ggaugcagacccagaagca

SEQ ID NO: 1386 - RNA, 19 nt, Artificial Sequence
  Synthetic
gagcugauauuuacucuuu

SEQ ID NO: 1387 - RNA, 19 nt, Artificial Sequence
  Synthetic
agauguuccuggagaguaa

SEQ ID NO: 1388 - RNA, 19 nt, Artificial Sequence
  Synthetic
gcaaauaccugaucugcaa

SEQ ID NO: 1389 - RNA, 19 nt, Artificial Sequence
  Synthetic
gagccgagauggaaauuua

SEQ ID NO: 1390 - RNA, 19 nt, Artificial Sequence
  Synthetic
uggcagucccagagagcaa

SEQ ID NO: 1391 - RNA, 19 nt, Artificial Sequence
  Synthetic
gcaagaugcugcucaggua

SEQ ID NO: 1392 - RNA, 19 nt, Artificial Sequence
  Synthetic
agacauuaccaucgagaca

SEQ ID NO: 1393 - RNA, 19 nt, Artificial Sequence
  Synthetic
ugcaugaggcugagggcaa

SEQ ID NO: 1394 - RNA, 19 nt, Artificial Sequence
  Synthetic
ccaaaaugaagaagaucaa

SEQ ID NO: 1395 - RNA, 19 nt, Artificial Sequence
  Synthetic
uguccuuccuagagggcaa

SEQ ID NO: 1396 - RNA, 19 nt, Artificial Sequence
  Synthetic
gagaugaggaacuguguau

SEQ ID NO: 1397 - RNA, 19 nt, Artificial Sequence
  Synthetic
agaucaaguuucagcacau

SEQ ID NO: 1398 - RNA, 19 nt, Artificial Sequence
  Synthetic
cauugaagaagcugccaaa

SEQ ID NO: 1399 - RNA, 19 nt, Artificial Sequence
  Synthetic
ugauggaguuuauggccaa

SEQ ID NO: 1400 - RNA, 19 nt, Artificial Sequence
  Synthetic
agaauuuggucccgagaga

SEQ ID NO: 1401 - RNA, 19 nt, Artificial Sequence
  Synthetic
ggacagugacucaggaaac

SEQ ID NO: 1402 - RNA, 19 nt, Artificial Sequence
  Synthetic
cagagaaaccugagaacac

SEQ ID NO: 1403 - RNA, 19 nt, Artificial Sequence
  Synthetic
gcacagaauaacuuugaga

SEQ ID NO: 1404 - RNA, 19 nt, Artificial Sequence
  Synthetic
ccuagaacaucacgcaaau

SEQ ID NO: 1405 - RNA, 19 nt, Artificial Sequence
  Synthetic
guguggagcaggugagguu

SEQ ID NO: 1406 - RNA, 19 nt, Artificial Sequence
  Synthetic
guauugugauggaguuuau

SEQ ID NO: 1407 - RNA, 19 nt, Artificial Sequence
  Synthetic
ugaauuaccucauugaaga

SEQ ID NO: 1408 - RNA, 19 nt, Artificial Sequence
  Synthetic
acauacuccuggacagcaa

SEQ ID NO: 1409 - RNA, 19 nt, Artificial Sequence
  Synthetic
ccaggagccgagauggaaa

SEQ ID NO: 1410 - RNA, 19 nt, Artificial Sequence
  Synthetic
gguucaacaugaugaugau

SEQ ID NO: 1411 - RNA, 19 nt, Artificial Sequence
  Synthetic
ggacggaguacgccaucaa

SEQ ID NO: 1412 - RNA, 19 nt, Artificial Sequence
  Synthetic
ucaccuggcugcacagaau

SEQ ID NO: 1413 - RNA, 19 nt, Artificial Sequence
  Synthetic
gcugaagaguggagcgguc

SEQ ID NO: 1414 - RNA, 19 nt, Artificial Sequence
  Synthetic
gggagguuaaugaggacau

SEQ ID NO: 1415 - RNA, 19 nt, Artificial Sequence
  Synthetic
gaauuaccucauugaagaa

SEQ ID NO: 1416 - RNA, 19 nt, Artificial Sequence
  Synthetic
cagcagagaaaccugagaa

SEQ ID NO: 1417 - RNA, 19 nt, Artificial Sequence
  Synthetic
gggaagaggugcaggagaa

SEQ ID NO: 1418 - RNA, 19 nt, Artificial Sequence
  Synthetic
ccacagacguccagaagaa

SEQ ID NO: 1419 - RNA, 19 nt, Artificial Sequence
  Synthetic
gcauggagcuuuuggaaga

SEQ ID NO: 1420 - RNA, 19 nt, Artificial Sequence
  Synthetic
gguauaugauagagauuga

SEQ ID NO: 1421 - RNA, 19 nt, Artificial Sequence
  Synthetic
cgucaagauuucugauuuu

SEQ ID NO: 1422 - RNA, 19 nt, Artificial Sequence
  Synthetic
gaauaaguuuguugcagaa

SEQ ID NO: 1423 - RNA, 19 nt, Artificial Sequence
  Synthetic
acaccaagcacgauguaua

SEQ ID NO: 1424 - RNA, 19 nt, Artificial Sequence
  Synthetic
uggaagaagccaagaagau

SEQ ID NO: 1425 - RNA, 19 nt, Artificial Sequence
  Synthetic
ccagcaaacugaugaagau

SEQ ID NO: 1426 - RNA, 19 nt, Artificial Sequence
  Synthetic
cggaggugguggaggaguu

SEQ ID NO: 1427 - RNA, 19 nt, Artificial Sequence
  Synthetic
caacaaggaacgaauggua

SEQ ID NO: 1428 - RNA, 19 nt, Artificial Sequence
  Synthetic
gcacggaagaucaguguca

SEQ ID NO: 1429 - RNA, 19 nt, Artificial Sequence
  Synthetic
gaaagaaacugcucaugau

SEQ ID NO: 1430 - RNA, 19 nt, Artificial Sequence
  Synthetic
ccaaguggcugcugcucaa

SEQ ID NO: 1431 - RNA, 19 nt, Artificial Sequence
  Synthetic
aggagaauaucgugcgcau

SEQ ID NO: 1432 - RNA, 19 nt, Artificial Sequence
  Synthetic
ucgucaagcugcuggccaa

SEQ ID NO: 1433 - RNA, 19 nt, Artificial Sequence
  Synthetic
acgugagccugcagggcaa

SEQ ID NO: 1434 - RNA, 19 nt, Artificial Sequence
  Synthetic
uggcuuaccuaaauguuaa

SEQ ID NO: 1435 - RNA, 19 nt, Artificial Sequence
  Synthetic
gagacgggcucccuggaaa

SEQ ID NO: 1436 - RNA, 19 nt, Artificial Sequence
  Synthetic
cugaugacgaagugaaaga

SEQ ID NO: 1437 - RNA, 19 nt, Artificial Sequence
  Synthetic
acucggaggugguggagga

SEQ ID NO: 1438 - RNA, 19 nt, Artificial Sequence
  Synthetic
agaagaacgccucggucaa

SEQ ID NO: 1439 - RNA, 19 nt, Artificial Sequence
  Synthetic
gugucaacgccaaggauga

SEQ ID NO: 1440 - RNA, 19 nt, Artificial Sequence
  Synthetic
gagaagaacgccucgguca

SEQ ID NO: 1441 - RNA, 19 nt, Artificial Sequence
  Synthetic
aguauuaccuagacauaga

SEQ ID NO: 1442 - RNA, 19 nt, Artificial Sequence
  Synthetic
ucuaaaugauggcuaagua

SEQ ID NO: 1443 - RNA, 19 nt, Artificial Sequence
  Synthetic
agaagaacauccugcacau

SEQ ID NO: 1444 - RNA, 19 nt, Artificial Sequence
  Synthetic
agaagauggagauggccaa

SEQ ID NO: 1445 - RNA, 19 nt, Artificial Sequence
  Synthetic
acgccaaggaugaggacca

SEQ ID NO: 1446 - RNA, 19 nt, Artificial Sequence
  Synthetic
acacgcaguaugaagauaa

SEQ ID NO: 1447 - RNA, 19 nt, Artificial Sequence
  Synthetic
agacagagugggagagauu

SEQ ID NO: 1448 - RNA, 19 nt, Artificial Sequence
  Synthetic
gcaaagcggucaaugagua

SEQ ID NO: 1449 - RNA, 19 nt, Artificial Sequence
  Synthetic
gcguggagaaauuuggaaa

SEQ ID NO: 1450 - RNA, 19 nt, Artificial Sequence
  Synthetic
uagugagcguggagaaauu

SEQ ID NO: 1451 - RNA, 19 nt, Artificial Sequence
  Synthetic
cuuauggaccagucaguaa

SEQ ID NO: 1452 - RNA, 19 nt, Artificial Sequence
  Synthetic
ggaccagucaguaagagaa

SEQ ID NO: 1453 - RNA, 19 nt, Artificial Sequence
  Synthetic
guggagaaauuuggaaaca

SEQ ID NO: 1454 - RNA, 19 nt, Artificial Sequence
  Synthetic
gaaugagggaguuaaccaa

SEQ ID NO: 1455 - RNA, 19 nt, Artificial Sequence
  Synthetic
ggaaugagggaguuaacca

SEQ ID NO: 1456 - RNA, 19 nt, Artificial Sequence
  Synthetic
acacugaccauucuagaaa

SEQ ID NO: 1457 - RNA, 19 nt, Artificial Sequence
  Synthetic
gucaguaagagaaggccaa

SEQ ID NO: 1458 - RNA, 19 nt, Artificial Sequence
  Synthetic
acaaaggccuuaccaggaa

SEQ ID NO: 1459 - RNA, 19 nt, Artificial Sequence
  Synthetic
aguaagagaaggccaagau

SEQ ID NO: 1460 - RNA, 19 nt, Artificial Sequence
  Synthetic
caaagcggucaaugaguau

SEQ ID NO: 1461 - RNA, 19 nt, Artificial Sequence
  Synthetic
ucgaauggcacaacacuuu

SEQ ID NO: 1462 - RNA, 19 nt, Artificial Sequence
  Synthetic
gagcugagguggggugaga

SEQ ID NO: 1463 - RNA, 19 nt, Artificial Sequence
  Synthetic
gagacagagugggagagau

SEQ ID NO: 1464 - RNA, 19 nt, Artificial Sequence
  Synthetic
acaccuauuucuuaacuca

SEQ ID NO: 1465 - RNA, 19 nt, Artificial Sequence
  Synthetic
uggcacaacacuuucuauu

SEQ ID NO: 1466 - RNA, 19 nt, Artificial Sequence
  Synthetic
gcacaacacuuucuauuuc

SEQ ID NO: 1467 - RNA, 19 nt, Artificial Sequence
  Synthetic
ggaaggguuaggacacuga

SEQ ID NO: 1468 - RNA, 19 nt, Artificial Sequence
  Synthetic
gcccacagauggacugagu

SEQ ID NO: 1469 - RNA, 19 nt, Artificial Sequence
  Synthetic
ggacacugaccauucuaga

SEQ ID NO: 1470 - RNA, 19 nt, Artificial Sequence
  Synthetic
uaagagaaggccaagaugu

SEQ ID NO: 1471 - RNA, 19 nt, Artificial Sequence
  Synthetic
guagugagcguggagaaau

SEQ ID NO: 1472 - RNA, 19 nt, Artificial Sequence
  Synthetic
ggcacaacacuuucuauuu

SEQ ID NO: 1473 - RNA, 19 nt, Artificial Sequence
  Synthetic
gaaauuuggaaacaccuau

SEQ ID NO: 1474 - RNA, 19 nt, Artificial Sequence
  Synthetic
caggcucugugcugaugaa

SEQ ID NO: 1475 - RNA, 19 nt, Artificial Sequence
  Synthetic
gacacugaccauucuagaa

SEQ ID NO: 1476 - RNA, 19 nt, Artificial Sequence
  Synthetic
ugagggaguuaaccaaguu

SEQ ID NO: 1477 - RNA, 19 nt, Artificial Sequence
  Synthetic
acaagaagaaagugaagaa

SEQ ID NO: 1478 - RNA, 19 nt, Artificial Sequence
  Synthetic
ggugaagaucggugacuuu

SEQ ID NO: 1479 - RNA, 19 nt, Artificial Sequence
  Synthetic
agaagaaagugaagaaccu

SEQ ID NO: 1480 - RNA, 19 nt, Artificial Sequence
  Synthetic
agucagacgucuaugccua

SEQ ID NO: 1481 - RNA, 19 nt, Artificial Sequence
  Synthetic
gaugacaagaagaaaguga

SEQ ID NO: 1482 - RNA, 19 nt, Artificial Sequence
  Synthetic
cgguaguagaggagguagu

SEQ ID NO: 1483 - RNA, 19 nt, Artificial Sequence
  Synthetic
aaguauaccugcccaacaa

SEQ ID NO: 1484 - RNA, 19 nt, Artificial Sequence
  Synthetic
cagcugaggugauccguau

SEQ ID NO: 1485 - RNA, 19 nt, Artificial Sequence
  Synthetic
gaucucaagucuaacaaca

SEQ ID NO: 1486 - RNA, 19 nt, Artificial Sequence
  Synthetic
uagaggagguagugaugga

SEQ ID NO: 1487 - RNA, 19 nt, Artificial Sequence
  Synthetic
uggccgaugacaagaagaa

SEQ ID NO: 1488 - RNA, 19 nt, Artificial Sequence
  Synthetic
ucaccaagaagcacagaau

SEQ ID NO: 1489 - RNA, 19 nt, Artificial Sequence
  Synthetic
ggggauacuucuaaauuuu

SEQ ID NO: 1490 - RNA, 19 nt, Artificial Sequence
  Synthetic
accgagaucucaagucuaa

SEQ ID NO: 1491 - RNA, 19 nt, Artificial Sequence
  Synthetic
agaugcaggugcucaggaa

SEQ ID NO: 1492 - RNA, 19 nt, Artificial Sequence
  Synthetic
ggcccaggcuuucaagaau

SEQ ID NO: 1493 - RNA, 19 nt, Artificial Sequence
  Synthetic
aguccuuggccgaugacaa

SEQ ID NO: 1494 - RNA, 19 nt, Artificial Sequence
  Synthetic
gcgaggagcucauugucga

SEQ ID NO: 1495 - RNA, 19 nt, Artificial Sequence
  Synthetic
cgggauggcaugagugucu

SEQ ID NO: 1496 - RNA, 19 nt, Artificial Sequence
  Synthetic
ccgaugacaagaagaaagu

SEQ ID NO: 1497 - RNA, 19 nt, Artificial Sequence
  Synthetic
augcaggugcucaggaaga

SEQ ID NO: 1498 - RNA, 19 nt, Artificial Sequence
  Synthetic
gcuacaaguuccaccagca

SEQ ID NO: 1499 - RNA, 19 nt, Artificial Sequence
  Synthetic
gcacccaggccgaugaguu

SEQ ID NO: 1500 - RNA, 19 nt, Artificial Sequence
  Synthetic
guaccgggacucaggcuau

SEQ ID NO: 1501 - RNA, 19 nt, Artificial Sequence
  Synthetic
gcuccagccucuaccauca

SEQ ID NO: 1502 - RNA, 19 nt, Artificial Sequence
  Synthetic
cuaacaacaucuuccuaca

SEQ ID NO: 1503 - RNA, 19 nt, Artificial Sequence
  Synthetic
ggaagacgcgacaugucaa

SEQ ID NO: 1504 - RNA, 19 nt, Artificial Sequence
  Synthetic
caagaagagaggcccaaga

SEQ ID NO: 1505 - RNA, 19 nt, Artificial Sequence
  Synthetic
ccaccgagaucucaagucu

SEQ ID NO: 1506 - RNA, 19 nt, Artificial Sequence
  Synthetic
aagagaggcccaagaugga

SEQ ID NO: 1507 - RNA, 19 nt, Artificial Sequence
  Synthetic
ggacaaagcaggagauuca

SEQ ID NO: 1508 - RNA, 19 nt, Artificial Sequence
  Synthetic
ugaauaagguguugaaaga

SEQ ID NO: 1509 - RNA, 19 nt, Artificial Sequence
  Synthetic
gggaaggagugcugugauu

SEQ ID NO: 1510 - RNA, 19 nt, Artificial Sequence
  Synthetic
gugcuaagaaagugcauua

SEQ ID NO: 1511 - RNA, 19 nt, Artificial Sequence
  Synthetic
gaaauguucuguagggauu

SEQ ID NO: 1512 - RNA, 19 nt, Artificial Sequence
  Synthetic
ugaagaaauccaagaaaga

SEQ ID NO: 1513 - RNA, 19 nt, Artificial Sequence
  Synthetic
ggaggaagcauguaagaga

SEQ ID NO: 1514 - RNA, 19 nt, Artificial Sequence
  Synthetic
cugaagaagcgaagcaaca

SEQ ID NO: 1515 - RNA, 19 nt, Artificial Sequence
  Synthetic
ucacaucagacgagagauu

SEQ ID NO: 1516 - RNA, 19 nt, Artificial Sequence
  Synthetic
ggaagggcaucuugaaaca

SEQ ID NO: 1517 - RNA, 19 nt, Artificial Sequence
  Synthetic
cggcaggacucuuaucuua

SEQ ID NO: 1518 - RNA, 19 nt, Artificial Sequence
  Synthetic
cuuuauggcuccugucaaa

SEQ ID NO: 1519 - RNA, 19 nt, Artificial Sequence
  Synthetic
gggcuggagggaugaauua

SEQ ID NO: 1520 - RNA, 19 nt, Artificial Sequence
  Synthetic
gcaaaggcaccuacggcaa

SEQ ID NO: 1521 - RNA, 19 nt, Artificial Sequence
  Synthetic
ccucauaucaucaguauuu

SEQ ID NO: 1522 - RNA, 19 nt, Artificial Sequence
  Synthetic
gaugacaacugcaauauua

SEQ ID NO: 1523 - RNA, 19 nt, Artificial Sequence
  Synthetic
gaaagaugauggugucaga

SEQ ID NO: 1524 - RNA, 19 nt, Artificial Sequence
  Synthetic
gagcaggacuugugcagga

SEQ ID NO: 1525 - RNA, 19 nt, Artificial Sequence
  Synthetic
gguggaugcugauggugaa

SEQ ID NO: 1526 - RNA, 19 nt, Artificial Sequence
  Synthetic
aauccaagaaagagaauga

SEQ ID NO: 1527 - RNA, 19 nt, Artificial Sequence
  Synthetic
guagacguguagauagaaa

SEQ ID NO: 1528 - RNA, 19 nt, Artificial Sequence
  Synthetic
gacgagagauugagaucau

SEQ ID NO: 1529 - RNA, 19 nt, Artificial Sequence
  Synthetic
gcugaagaaauccaagaaa

SEQ ID NO: 1530 - RNA, 19 nt, Artificial Sequence
  Synthetic
ggacaaaauuaaggaugaa

SEQ ID NO: 1531 - RNA, 19 nt, Artificial Sequence
  Synthetic
cauauucuccagaggauua

SEQ ID NO: 1532 - RNA, 19 nt, Artificial Sequence
  Synthetic
ggaaguugaugcacaccaa

SEQ ID NO: 1533 - RNA, 19 nt, Artificial Sequence
  Synthetic
aagaaauccaagaaagaga

SEQ ID NO: 1534 - RNA, 19 nt, Artificial Sequence
  Synthetic
ccauccaaguugaguucua

SEQ ID NO: 1535 - RNA, 19 nt, Artificial Sequence
  Synthetic
aaacuugacugcacauuaa

SEQ ID NO: 1536 - RNA, 19 nt, Artificial Sequence
  Synthetic
agagaaaguuccauucauu

SEQ ID NO: 1537 - RNA, 19 nt, Artificial Sequence
  Synthetic
uguaauagcugaagaggaa

SEQ ID NO: 1538 - RNA, 19 nt, Artificial Sequence
  Synthetic
ccauggaagugaugagaaa

SEQ ID NO: 1539 - RNA, 19 nt, Artificial Sequence
  Synthetic
gguagaagauugugucaaa

SEQ ID NO: 1540 - RNA, 19 nt, Artificial Sequence
  Synthetic
caucaaagcuaaugaauga

SEQ ID NO: 1541 - RNA, 19 nt, Artificial Sequence
  Synthetic
gcagaaacgugcuuagaaa

SEQ ID NO: 1542 - RNA, 19 nt, Artificial Sequence
  Synthetic
gagaugaauuucugacuaa

SEQ ID NO: 1543 - RNA, 19 nt, Artificial Sequence
  Synthetic
ggaauuaugcauugguuua

SEQ ID NO: 1544 - RNA, 19 nt, Artificial Sequence
  Synthetic
gaaaagagccaaagaggaa

SEQ ID NO: 1545 - RNA, 19 nt, Artificial Sequence
  Synthetic
caacauaggcuuaaugauu

SEQ ID NO: 1546 - RNA, 19 nt, Artificial Sequence
  Synthetic
agacagaauucccaaauaa

SEQ ID NO: 1547 - RNA, 19 nt, Artificial Sequence
  Synthetic
aggcagagguuacagguua

SEQ ID NO: 1548 - RNA, 19 nt, Artificial Sequence
  Synthetic
cagcagaacuuguacauau

SEQ ID NO: 1549 - RNA, 19 nt, Artificial Sequence
  Synthetic
acaaacagauacacaguaa

SEQ ID NO: 1550 - RNA, 19 nt, Artificial Sequence
  Synthetic
gaaggaagccagaguacaa

SEQ ID NO: 1551 - RNA, 19 nt, Artificial Sequence
  Synthetic
agauagaggagcaguuaua

SEQ ID NO: 1552 - RNA, 19 nt, Artificial Sequence
  Synthetic
caagcagcauggaggaaua

SEQ ID NO: 1553 - RNA, 19 nt, Artificial Sequence
  Synthetic
aaacgaaaucucagugaua

SEQ ID NO: 1554 - RNA, 19 nt, Artificial Sequence
  Synthetic
uaacaaaggagaggaaaua

SEQ ID NO: 1555 - RNA, 19 nt, Artificial Sequence
  Synthetic
cuaccaaggucuaugauau

SEQ ID NO: 1556 - RNA, 19 nt, Artificial Sequence
  Synthetic
cuacacauguucagggauu

SEQ ID NO: 1557 - RNA, 19 nt, Artificial Sequence
  Synthetic
gccagaagaagcagaauaa

SEQ ID NO: 1558 - RNA, 19 nt, Artificial Sequence
  Synthetic
ccaaauaaagucaagagua

SEQ ID NO: 1559 - RNA, 19 nt, Artificial Sequence
  Synthetic
gccaaugugugaagugaaa

SEQ ID NO: 1560 - RNA, 19 nt, Artificial Sequence
  Synthetic
ugaccaagauguuuguaaa

SEQ ID NO: 1561 - RNA, 19 nt, Artificial Sequence
  Synthetic
gcaaagcccuaguaacaua

SEQ ID NO: 1562 - RNA, 19 nt, Artificial Sequence
  Synthetic
ggacagugauuuuaguuuu

SEQ ID NO: 1563 - RNA, 19 nt, Artificial Sequence
  Synthetic
agaagaagcagaauaacua

SEQ ID NO: 1564 - RNA, 19 nt, Artificial Sequence
  Synthetic
gagagaaugugguauagaa

SEQ ID NO: 1565 - RNA, 19 nt, Artificial Sequence
  Synthetic
caucaaaugugcaaacaga

SEQ ID NO: 1566 - RNA, 19 nt, Artificial Sequence
  Synthetic
gaacuaggcugggaaguaa

SEQ ID NO: 1567 - RNA, 19 nt, Artificial Sequence
  Synthetic
gcagaagcuuauagaaaua

SEQ ID NO: 1568 - RNA, 19 nt, Artificial Sequence
  Synthetic
caguaauagugauggaaua

SEQ ID NO: 1569 - RNA, 19 nt, Artificial Sequence
  Synthetic
guacagaagccaagacaaa

SEQ ID NO: 1570 - RNA, 19 nt, Artificial Sequence
  Synthetic
gcccaaauaucaagaaaua

SEQ ID NO: 1571 - RNA, 19 nt, Artificial Sequence
  Synthetic
cuuacaagcuugaaggaaa

SEQ ID NO: 1572 - RNA, 19 nt, Artificial Sequence
  Synthetic
agaaaggauuguagacuaa

SEQ ID NO: 1573 - RNA, 19 nt, Artificial Sequence
  Synthetic
gagaaaggauuguagacua

SEQ ID NO: 1574 - RNA, 19 nt, Artificial Sequence
  Synthetic
acauuaagcuguaggauuu

SEQ ID NO: 1575 - RNA, 19 nt, Artificial Sequence
  Synthetic
caacauaaauccaagaaga

SEQ ID NO: 1576 - RNA, 19 nt, Artificial Sequence
  Synthetic
guagagagauggagaccaa

SEQ ID NO: 1577 - RNA, 19 nt, Artificial Sequence
  Synthetic
gaagcaacauuuagugaaa

SEQ ID NO: 1578 - RNA, 19 nt, Artificial Sequence
  Synthetic
gugaacagaugcaaggaaa

SEQ ID NO: 1579 - RNA, 19 nt, Artificial Sequence
  Synthetic
cuuaagagcuguagaaguu

SEQ ID NO: 1580 - RNA, 19 nt, Artificial Sequence
  Synthetic
cuguagaacuuguaaagaa

SEQ ID NO: 1581 - RNA, 19 nt, Artificial Sequence
  Synthetic
aauaaugagcugaaggaua

SEQ ID NO: 1582 - RNA, 19 nt, Artificial Sequence
  Synthetic
gaagaaaugugauggguca

SEQ ID NO: 1583 - RNA, 19 nt, Artificial Sequence
  Synthetic
gcgcaaaggcaguuguauu

SEQ ID NO: 1584 - RNA, 19 nt, Artificial Sequence
  Synthetic
cagauaagcuucuagaauu

SEQ ID NO: 1585 - RNA, 19 nt, Artificial Sequence
  Synthetic
gaaauaagguagacucaau

SEQ ID NO: 1586 - RNA, 19 nt, Artificial Sequence
  Synthetic
ggaaggucuaugugagaaa

SEQ ID NO: 1587 - RNA, 19 nt, Artificial Sequence
  Synthetic
cagcagaauucuuguaaca

SEQ ID NO: 1588 - RNA, 19 nt, Artificial Sequence
  Synthetic
acaagaagcuacugaugaa

SEQ ID NO: 1589 - RNA, 19 nt, Artificial Sequence
  Synthetic
aggaauugcuguugucuua

SEQ ID NO: 1590 - RNA, 19 nt, Artificial Sequence
  Synthetic
gggagaaaccuuugaaguu

SEQ ID NO: 1591 - RNA, 19 nt, Artificial Sequence
  Synthetic
caaaagaugaccugagaaa

SEQ ID NO: 1592 - RNA, 19 nt, Artificial Sequence
  Synthetic
caacugaaacucaaggaaa

SEQ ID NO: 1593 - RNA, 19 nt, Artificial Sequence
  Synthetic
cuuugaaguuccagaaauu

SEQ ID NO: 1594 - RNA, 19 nt, Artificial Sequence
  Synthetic
agaaauggauacugaccaa

SEQ ID NO: 1595 - RNA, 19 nt, Artificial Sequence
  Synthetic
cauaaauacccaagacauu

SEQ ID NO: 1596 - RNA, 19 nt, Artificial Sequence
  Synthetic
cauucgaacuuuaggaaaa

SEQ ID NO: 1597 - RNA, 19 nt, Artificial Sequence
  Synthetic
ggagaauagcagugggaca

SEQ ID NO: 1598 - RNA, 19 nt, Artificial Sequence
  Synthetic
ucuuagggcucaagggaga

SEQ ID NO: 1599 - RNA, 19 nt, Artificial Sequence
  Synthetic
gcagagagaucgaaaucca

SEQ ID NO: 1600 - RNA, 19 nt, Artificial Sequence
  Synthetic
ccacgaucauggaggaguu

SEQ ID NO: 1601 - RNA, 19 nt, Artificial Sequence
  Synthetic
agacauaaagccagaaaau

SEQ ID NO: 1602 - RNA, 19 nt, Artificial Sequence
  Synthetic
ggccagaaggugauggaga

SEQ ID NO: 1603 - RNA, 19 nt, Artificial Sequence
  Synthetic
agauagagaaggagggcgu

SEQ ID NO: 1604 - RNA, 19 nt, Artificial Sequence
  Synthetic
ccaaacugcucaggcauaa

SEQ ID NO: 1605 - RNA, 19 nt, Artificial Sequence
  Synthetic
cuucacaauugaugacuuu

SEQ ID NO: 1606 - RNA, 19 nt, Artificial Sequence
  Synthetic
caucacacaacgagaccua

SEQ ID NO: 1607 - RNA, 19 nt, Artificial Sequence
  Synthetic
ucacagagacauaaagcca

SEQ ID NO: 1608 - RNA, 19 nt, Artificial Sequence
  Synthetic
agaaggugauggagaauag

SEQ ID NO: 1609 - RNA, 19 nt, Artificial Sequence
  Synthetic
acagagacauaaagccaga

SEQ ID NO: 1610 - RNA, 19 nt, Artificial Sequence
  Synthetic
agaaggagggcguggagca

SEQ ID NO: 1611 - RNA, 19 nt, Artificial Sequence
  Synthetic
cagaagagcugcacauuug

SEQ ID NO: 1612 - RNA, 19 nt, Artificial Sequence
  Synthetic
acaaugagaagguggaucu

SEQ ID NO: 1613 - RNA, 19 nt, Artificial Sequence
  Synthetic
gcauuggagugcuuugcua

SEQ ID NO: 1614 - RNA, 19 nt, Artificial Sequence
  Synthetic
ccagcgaguccuccggaaa

SEQ ID NO: 1615 - RNA, 19 nt, Artificial Sequence
  Synthetic
aggagggcguggagcauca

SEQ ID NO: 1616 - RNA, 19 nt, Artificial Sequence
  Synthetic
cagaaggugauggagaaua

SEQ ID NO: 1617 - RNA, 19 nt, Artificial Sequence
  Synthetic
caucagcugcgcagagaga

SEQ ID NO: 1618 - RNA, 19 nt, Artificial Sequence
  Synthetic
gcgcagagagaucgaaauc

SEQ ID NO: 1619 - RNA, 19 nt, Artificial Sequence
  Synthetic
acauaaagccagaaaaucu

SEQ ID NO: 1620 - RNA, 19 nt, Artificial Sequence
  Synthetic
ucauggaggaguuggcaga

SEQ ID NO: 1621 - RNA, 19 nt, Artificial Sequence
  Synthetic
ucuucaagucccagauaga

SEQ ID NO: 1622 - RNA, 19 nt, Artificial Sequence
  Synthetic
aggaagacaauguguggca

SEQ ID NO: 1623 - RNA, 19 nt, Artificial Sequence
  Synthetic
agucccagauagagaagga

SEQ ID NO: 1624 - RNA, 19 nt, Artificial Sequence
  Synthetic
gcgagaaauuagaugaaca

SEQ ID NO: 1625 - RNA, 19 nt, Artificial Sequence
  Synthetic
ggugaagauugcagauuuu

SEQ ID NO: 1626 - RNA, 19 nt, Artificial Sequence
  Synthetic
ccacgauaauagaggaagu

SEQ ID NO: 1627 - RNA, 19 nt, Artificial Sequence
  Synthetic
aggaaggacuggagcacca

SEQ ID NO: 1628 - RNA, 19 nt, Artificial Sequence
  Synthetic
augagcugcuggugggaua

SEQ ID NO: 1629 - RNA, 19 nt, Artificial Sequence
  Synthetic
gaagacaaugugugggaca

SEQ ID NO: 1630 - RNA, 19 nt, Artificial Sequence
  Synthetic
ucacagagauauuaagcca

SEQ ID NO: 1631 - RNA, 19 nt, Artificial Sequence
  Synthetic
aggugaagauugcagauuu

SEQ ID NO: 1632 - RNA, 19 nt, Artificial Sequence
  Synthetic
gggagaacauaugaugaaa

SEQ ID NO: 1633 - RNA, 19 nt, Artificial Sequence
  Synthetic
agauagagaaggaaggacu

SEQ ID NO: 1634 - RNA, 19 nt, Artificial Sequence
  Synthetic
ggagaacauaugaugaaaa

SEQ ID NO: 1635 - RNA, 19 nt, Artificial Sequence
  Synthetic
ggggagaacauaugaugaa

SEQ ID NO: 1636 - RNA, 19 nt, Artificial Sequence
  Synthetic
gauccaggcucaucuacaa

SEQ ID NO: 1637 - RNA, 19 nt, Artificial Sequence
  Synthetic
acagagauauuaagccaga

SEQ ID NO: 1638 - RNA, 19 nt, Artificial Sequence
  Synthetic
uaauagaggaaguugcaga

SEQ ID NO: 1639 - RNA, 19 nt, Artificial Sequence
  Synthetic
ucuacaaggagcugcagaa

SEQ ID NO: 1640 - RNA, 19 nt, Artificial Sequence
  Synthetic
gcagaaaagcgagaaauua

SEQ ID NO: 1641 - RNA, 19 nt, Artificial Sequence
  Synthetic
aagcgagaaauuagaugaa

SEQ ID NO: 1642 - RNA, 19 nt, Artificial Sequence
  Synthetic
cuacaaggagcugcagaaa

SEQ ID NO: 1643 - RNA, 19 nt, Artificial Sequence
  Synthetic
ucuucaagucgcagauaga

SEQ ID NO: 1644 - RNA, 19 nt, Artificial Sequence
  Synthetic
auauuaagccagagaaccu

SEQ ID NO: 1645 - RNA, 19 nt, Artificial Sequence
  Synthetic
aggaagacaauguguggga

SEQ ID NO: 1646 - RNA, 19 nt, Artificial Sequence
  Synthetic
augacaagaaagugauuca

SEQ ID NO: 1647 - RNA, 19 nt, Artificial Sequence
  Synthetic
gagcaagggugcagagcaa

SEQ ID NO: 1648 - RNA, 19 nt, Artificial Sequence
  Synthetic
agagaaaacuucagagaaa

SEQ ID NO: 1649 - RNA, 19 nt, Artificial Sequence
  Synthetic
ccgcaaaugugcugggaca

SEQ ID NO: 1650 - RNA, 19 nt, Artificial Sequence
  Synthetic
gccaaaacaugaaggaaaa

SEQ ID NO: 1651 - RNA, 19 nt, Artificial Sequence
  Synthetic
ggaaacaagcaccgcauaa

SEQ ID NO: 1652 - RNA, 19 nt, Artificial Sequence
  Synthetic
cuagaaaucacaagaacaa

SEQ ID NO: 1653 - RNA, 19 nt, Artificial Sequence
  Synthetic
gugcuaugcuggacauuaa

SEQ ID NO: 1654 - RNA, 19 nt, Artificial Sequence
  Synthetic
ccaacaaacaguacgggua

SEQ ID NO: 1655 - RNA, 19 nt, Artificial Sequence
  Synthetic
acgcacagacccaggauua

SEQ ID NO: 1656 - RNA, 19 nt, Artificial Sequence
  Synthetic
ugaacggacuggauaguaa

SEQ ID NO: 1657 - RNA, 19 nt, Artificial Sequence
  Synthetic
ggaaacaugcuguacuaaa

SEQ ID NO: 1658 - RNA, 19 nt, Artificial Sequence
  Synthetic
gguaauaaauagcaugcau

SEQ ID NO: 1659 - RNA, 19 nt, Artificial Sequence
  Synthetic
gagggaagcuuguggaaac

SEQ ID NO: 1660 - RNA, 19 nt, Artificial Sequence
  Synthetic
ucgcaaacauaggguaaua

SEQ ID NO: 1661 - RNA, 19 nt, Artificial Sequence
  Synthetic
caacaaacaguacggguau

SEQ ID NO: 1662 - RNA, 19 nt, Artificial Sequence
  Synthetic
gcaacgaggagcuggccaa

SEQ ID NO: 1663 - RNA, 19 nt, Artificial Sequence
  Synthetic
ccaugaucgaggugaacaa

SEQ ID NO: 1664 - RNA, 19 nt, Artificial Sequence
  Synthetic
caacuugauucuugugauu

SEQ ID NO: 1665 - RNA, 19 nt, Artificial Sequence
  Synthetic
gcaaacauaggguaauaaa

SEQ ID NO: 1666 - RNA, 19 nt, Artificial Sequence
  Synthetic
ggauaguaaaguggaauua

SEQ ID NO: 1667 - RNA, 19 nt, Artificial Sequence
  Synthetic
ugccaaaacaugaaggaaa

SEQ ID NO: 1668 - RNA, 19 nt, Artificial Sequence
  Synthetic
ccgcauaaauacuugaguu

SEQ ID NO: 1669 - RNA, 19 nt, Artificial Sequence
  Synthetic
acugagaacugcaaugaau

SEQ ID NO: 1670 - RNA, 19 nt, Artificial Sequence
  Synthetic
gaagucaaaugcaugguua

SEQ ID NO: 1671 - RNA, 19 nt, Artificial Sequence
  Synthetic
gaaacaugcuguacuaaaa

SEQ ID NO: 1672 - RNA, 19 nt, Artificial Sequence
  Synthetic
aguaagacuugauugguuu

SEQ ID NO: 1673 - RNA, 19 nt, Artificial Sequence
  Synthetic
ucaaagacguuacuaggaa

SEQ ID NO: 1674 - RNA, 19 nt, Artificial Sequence
  Synthetic
ccuucaagacuguguucaa

SEQ ID NO: 1675 - RNA, 19 nt, Artificial Sequence
  Synthetic
ucuccaugaucgaggugaa

SEQ ID NO: 1676 - RNA, 19 nt, Artificial Sequence
  Synthetic
ggacauuguaaacguauuu

SEQ ID NO: 1677 - RNA, 19 nt, Artificial Sequence
  Synthetic
gguaaggguuggaguuaga

SEQ ID NO: 1678 - RNA, 19 nt, Artificial Sequence
  Synthetic
ccagaaaaguuuggagaaa

SEQ ID NO: 1679 - RNA, 19 nt, Artificial Sequence
  Synthetic
ucucuaugcuuuugggcaa

SEQ ID NO: 1680 - RNA, 19 nt, Artificial Sequence
  Synthetic
gggaugaggagcuggccaa

SEQ ID NO: 1681 - RNA, 19 nt, Artificial Sequence
  Synthetic
agaaaaguuuggagaaaga

SEQ ID NO: 1682 - RNA, 19 nt, Artificial Sequence
  Synthetic
guuuggagaaagagaauuu

SEQ ID NO: 1683 - RNA, 19 nt, Artificial Sequence
  Synthetic
ggagaggggagaagugaaa

SEQ ID NO: 1684 - RNA, 19 nt, Artificial Sequence
  Synthetic
gcccaggccugaagaguca

SEQ ID NO: 1685 - RNA, 19 nt, Artificial Sequence
  Synthetic
ccaugacgcuggaccgcua

SEQ ID NO: 1686 - RNA, 19 nt, Artificial Sequence
  Synthetic
gaacagugaagaugaccuu

SEQ ID NO: 1687 - RNA, 19 nt, Artificial Sequence
  Synthetic
ggcuggaggacuugggaca

SEQ ID NO: 1688 - RNA, 19 nt, Artificial Sequence
  Synthetic
ccuacaugcugcuggccau

SEQ ID NO: 1689 - RNA, 19 nt, Artificial Sequence
  Synthetic
caagaaugccccugaugaa

SEQ ID NO: 1690 - RNA, 19 nt, Artificial Sequence
  Synthetic
gccaagauccgaacaguga

SEQ ID NO: 1691 - RNA, 19 nt, Artificial Sequence
  Synthetic
accuaaaagucaagacaca

SEQ ID NO: 1692 - RNA, 19 nt, Artificial Sequence
  Synthetic
gggacuuggagcuggcaga

SEQ ID NO: 1693 - RNA, 19 nt, Artificial Sequence
  Synthetic
gaggguaaggguuggaguu

SEQ ID NO: 1694 - RNA, 19 nt, Artificial Sequence
  Synthetic
gcucuuggcuuccagaaaa

SEQ ID NO: 1695 - RNA, 19 nt, Artificial Sequence
  Synthetic
gcagucagggagaaucaaa

SEQ ID NO: 1696 - RNA, 19 nt, Artificial Sequence
  Synthetic
ggucgaucccagucacauu

SEQ ID NO: 1697 - RNA, 19 nt, Artificial Sequence
  Synthetic
ugaugaagauuccaccaau

SEQ ID NO: 1698 - RNA, 19 nt, Artificial Sequence
  Synthetic
aaaguuuggagaaagagaa

SEQ ID NO: 1699 - RNA, 19 nt, Artificial Sequence
  Synthetic
gagaauuugaggcggauug

SEQ ID NO: 1700 - RNA, 19 nt, Artificial Sequence
  Synthetic
ccaucaaaccucuccacuu

SEQ ID NO: 1701 - RNA, 19 nt, Artificial Sequence
  Synthetic
ccucauaagcucccaaucu

SEQ ID NO: 1702 - RNA, 19 nt, Artificial Sequence
  Synthetic
aaaccuugcucauggauuc

SEQ ID NO: 1703 - RNA, 19 nt, Artificial Sequence
  Synthetic
gcugagaccaucaucuuuu

SEQ ID NO: 1704 - RNA, 19 nt, Artificial Sequence
  Synthetic
caucaaaccucuccacuug

SEQ ID NO: 1705 - RNA, 19 nt, Artificial Sequence
  Synthetic
cuaccugucuccauucuaa

SEQ ID NO: 1706 - RNA, 19 nt, Artificial Sequence
  Synthetic
uggauuuguuguuguuguu

SEQ ID NO: 1707 - RNA, 19 nt, Artificial Sequence
  Synthetic
ggucagagcuggaggauuu

SEQ ID NO: 1708 - RNA, 19 nt, Artificial Sequence
  Synthetic
gugaagagcugaaggagaa

SEQ ID NO: 1709 - RNA, 19 nt, Artificial Sequence
  Synthetic
ggacauagggcuaaggcaa

SEQ ID NO: 1710 - RNA, 19 nt, Artificial Sequence
  Synthetic
ggaaagaggugaacuggua

SEQ ID NO: 1711 - RNA, 19 nt, Artificial Sequence
  Synthetic
gcuaauggacauagggcua

SEQ ID NO: 1712 - RNA, 19 nt, Artificial Sequence
  Synthetic
ggaugaggguggagguuau

SEQ ID NO: 1713 - RNA, 19 nt, Artificial Sequence
  Synthetic
gauaaagccucaagguuuu

SEQ ID NO: 1714 - RNA, 19 nt, Artificial Sequence
  Synthetic
ccaagauucuagaugauua

SEQ ID NO: 1715 - RNA, 19 nt, Artificial Sequence
  Synthetic
ugauaaagccucaagguuu

SEQ ID NO: 1716 - RNA, 19 nt, Artificial Sequence
  Synthetic
ccugagaacauuagugcua

SEQ ID NO: 1717 - RNA, 19 nt, Artificial Sequence
  Synthetic
auucaaagguucuagguuu

SEQ ID NO: 1718 - RNA, 19 nt, Artificial Sequence
  Synthetic
ccacaggucuagacuauua

SEQ ID NO: 1719 - RNA, 19 nt, Artificial Sequence
  Synthetic
guucuaaggaccugaaauu

SEQ ID NO: 1720 - RNA, 19 nt, Artificial Sequence
  Synthetic
gggaagauuuggagaacac

SEQ ID NO: 1721 - RNA, 19 nt, Artificial Sequence
  Synthetic
uggagaacagcgagauuua

SEQ ID NO: 1722 - RNA, 19 nt, Artificial Sequence
  Synthetic
cuaccgaguucaagugauu

SEQ ID NO: 1723 - RNA, 19 nt, Artificial Sequence
  Synthetic
gaaagaaggagacccguua

SEQ ID NO: 1724 - RNA, 19 nt, Artificial Sequence
  Synthetic
acgaaauccucuaugucaa

SEQ ID NO: 1725 - RNA, 19 nt, Artificial Sequence
  Synthetic
cuuaagaccuacuguucua

SEQ ID NO: 1726 - RNA, 19 nt, Artificial Sequence
  Synthetic
gcuccaagauucuagauga

SEQ ID NO: 1727 - RNA, 19 nt, Artificial Sequence
  Synthetic
guucuaaagcucugacauu

SEQ ID NO: 1728 - RNA, 19 nt, Artificial Sequence
  Synthetic
ggaacugcaugcugaauga

SEQ ID NO: 1729 - RNA, 19 nt, Artificial Sequence
  Synthetic
agugaagagcugaaggaga

SEQ ID NO: 1730 - RNA, 19 nt, Artificial Sequence
  Synthetic
gugaacugguagucaggua

SEQ ID NO: 1731 - RNA, 19 nt, Artificial Sequence
  Synthetic
gucgaaagcucuagaaucu

SEQ ID NO: 1732 - RNA, 19 nt, Artificial Sequence
  Synthetic
cagcgagauuuaugacuau

SEQ ID NO: 1733 - RNA, 19 nt, Artificial Sequence
  Synthetic
cuaugagucuagauguuua

SEQ ID NO: 1734 - RNA, 19 nt, Artificial Sequence
  Synthetic
guccacaggucuagacuau

SEQ ID NO: 1735 - RNA, 19 nt, Artificial Sequence
  Synthetic
gcaucuaaguuauaagacu

SEQ ID NO: 1736 - RNA, 19 nt, Artificial Sequence
  Synthetic
cuauuaaagugcuaagguu

SEQ ID NO: 1737 - RNA, 19 nt, Artificial Sequence
  Synthetic
gcaugagcgagaauggcua

SEQ ID NO: 1738 - RNA, 19 nt, Artificial Sequence
  Synthetic
cagcagcaugagcgagaau

SEQ ID NO: 1739 - RNA, 19 nt, Artificial Sequence
  Synthetic
gagacuggaucgauggugu

SEQ ID NO: 1740 - RNA, 19 nt, Artificial Sequence
  Synthetic
guaauaaagaagccgaucu

SEQ ID NO: 1741 - RNA, 19 nt, Artificial Sequence
  Synthetic
gcggccagcugcuuccaaa

SEQ ID NO: 1742 - RNA, 19 nt, Artificial Sequence
  Synthetic
gaucgaugguguucucaac

SEQ ID NO: 1743 - RNA, 19 nt, Artificial Sequence
  Synthetic
uaauaaagaagccgaucuc

SEQ ID NO: 1744 - RNA, 19 nt, Artificial Sequence
  Synthetic
ggcccuggcuguaauaaag

SEQ ID NO: 1745 - RNA, 19 nt, Artificial Sequence
  Synthetic
gaaucaaggcaggcacuuc

SEQ ID NO: 1746 - RNA, 19 nt, Artificial Sequence
  Synthetic
gaaccugaacgaccugaug

SEQ ID NO: 1747 - RNA, 19 nt, Artificial Sequence
  Synthetic
gggcgucucucccguuuuc

SEQ ID NO: 1748 - RNA, 19 nt, Artificial Sequence
  Synthetic
caugcccgcuucgugauga

SEQ ID NO: 1749 - RNA, 19 nt, Artificial Sequence
  Synthetic
ccgaggcccugacuucuuc

SEQ ID NO: 1750 - RNA, 19 nt, Artificial Sequence
  Synthetic
ggugagagagagagagaaa

SEQ ID NO: 1751 - RNA, 19 nt, Artificial Sequence
  Synthetic
cagcagaccauaagggaua

SEQ ID NO: 1752 - RNA, 19 nt, Artificial Sequence
  Synthetic
ccaaagugauccagaagaa

SEQ ID NO: 1753 - RNA, 19 nt, Artificial Sequence
  Synthetic
ggaugaaccugaugaguuu

SEQ ID NO: 1754 - RNA, 19 nt, Artificial Sequence
  Synthetic
gaggauuggugaugaaauu

SEQ ID NO: 1755 - RNA, 19 nt, Artificial Sequence
  Synthetic
cagcaaugaucuuuacaua

SEQ ID NO: 1756 - RNA, 19 nt, Artificial Sequence
  Synthetic
gcaacaagcugccaagcaa

SEQ ID NO: 1757 - RNA, 19 nt, Artificial Sequence
  Synthetic
gaaaugaacagcagcuuua

SEQ ID NO: 1758 - RNA, 19 nt, Artificial Sequence
  Synthetic
aagaagaaccacuggacua

SEQ ID NO: 1759 - RNA, 19 nt, Artificial Sequence
  Synthetic
ccgaggagcuggacaguga

SEQ ID NO: 1760 - RNA, 19 nt, Artificial Sequence
  Synthetic
uaaucaaggaagcgggaaa

SEQ ID NO: 1761 - RNA, 19 nt, Artificial Sequence
  Synthetic
agaaugaggaggaggauga

SEQ ID NO: 1762 - RNA, 19 nt, Artificial Sequence
  Synthetic
ccaaagagugaaacagauu

SEQ ID NO: 1763 - RNA, 19 nt, Artificial Sequence
  Synthetic
ggcccaagcuccagaucaa

SEQ ID NO: 1764 - RNA, 19 nt, Artificial Sequence
  Synthetic
ucgaggaggccgagaguau

SEQ ID NO: 1765 - RNA, 19 nt, Artificial Sequence
  Synthetic
cgguagccauuuuggauaa

SEQ ID NO: 1766 - RNA, 19 nt, Artificial Sequence
  Synthetic
gaagcauucucgagcuaua

SEQ ID NO: 1767 - RNA, 19 nt, Artificial Sequence
  Synthetic
gaugaggauuggugaugaa

SEQ ID NO: 1768 - RNA, 19 nt, Artificial Sequence
  Synthetic
gagcuauagaacugauuaa

SEQ ID NO: 1769 - RNA, 19 nt, Artificial Sequence
  Synthetic
gcggagagguguggaaaga

SEQ ID NO: 1770 - RNA, 19 nt, Artificial Sequence
  Synthetic
gaaccaaguccuacaauga

SEQ ID NO: 1771 - RNA, 19 nt, Artificial Sequence
  Synthetic
ccugaggucuggagaugaa

SEQ ID NO: 1772 - RNA, 19 nt, Artificial Sequence
  Synthetic
aggaaagacagccagaaua

SEQ ID NO: 1773 - RNA, 19 nt, Artificial Sequence
  Synthetic
ccagccagucagugggaaa

SEQ ID NO: 1774 - RNA, 19 nt, Artificial Sequence
  Synthetic
gagggaaacaugugacuau

SEQ ID NO: 1775 - RNA, 19 nt, Artificial Sequence
  Synthetic
ggaagagugugaagaugau

SEQ ID NO: 1776 - RNA, 19 nt, Artificial Sequence
  Synthetic
ggagcuggacagugaacua

SEQ ID NO: 1777 - RNA, 19 nt, Artificial Sequence
  Synthetic
ugagcaagggugagagaga

SEQ ID NO: 1778 - RNA, 19 nt, Artificial Sequence
  Synthetic
cggagaaugaggaggagga

SEQ ID NO: 1779 - RNA, 19 nt, Artificial Sequence
  Synthetic
gagaaaagagacuggauuu

SEQ ID NO: 1780 - RNA, 19 nt, Artificial Sequence
  Synthetic
ccaaagaagauuauugaga

SEQ ID NO: 1781 - RNA, 19 nt, Artificial Sequence
  Synthetic
ggaagcacauagaggauga

SEQ ID NO: 1782 - RNA, 19 nt, Artificial Sequence
  Synthetic
gaaaggagcaagacgauga

SEQ ID NO: 1783 - RNA, 19 nt, Artificial Sequence
  Synthetic
gagccacaauggagaguca

SEQ ID NO: 1784 - RNA, 19 nt, Artificial Sequence
  Synthetic
cgugagagccggaagcaca

SEQ ID NO: 1785 - RNA, 19 nt, Artificial Sequence
  Synthetic
augaaaagcucguccgcua

SEQ ID NO: 1786 - RNA, 19 nt, Artificial Sequence
  Synthetic
aagaaugccaugagagcca

SEQ ID NO: 1787 - RNA, 19 nt, Artificial Sequence
  Synthetic
ccggaagcacauagaggau

SEQ ID NO: 1788 - RNA, 19 nt, Artificial Sequence
  Synthetic
agaccgugguggaggaauc

SEQ ID NO: 1789 - RNA, 19 nt, Artificial Sequence
  Synthetic
cgaucaaggaccaggcgga

SEQ ID NO: 1790 - RNA, 19 nt, Artificial Sequence
  Synthetic
acucugaccuguuauuaaa

SEQ ID NO: 1791 - RNA, 19 nt, Artificial Sequence
  Synthetic
ccucuugccuccagaacuu

SEQ ID NO: 1792 - RNA, 19 nt, Artificial Sequence
  Synthetic
acacacaccacguggagau

SEQ ID NO: 1793 - RNA, 19 nt, Artificial Sequence
  Synthetic
gaggaaucgcucacaaaga

SEQ ID NO: 1794 - RNA, 19 nt, Artificial Sequence
  Synthetic
gcagagggccuacgugaga

SEQ ID NO: 1795 - RNA, 19 nt, Artificial Sequence
  Synthetic
cagcaagaacuuccaguga

SEQ ID NO: 1796 - RNA, 19 nt, Artificial Sequence
  Synthetic
uggaggaaucgcucacaaa

SEQ ID NO: 1797 - RNA, 19 nt, Artificial Sequence
  Synthetic
uggcgcugcaugaggacaa

SEQ ID NO: 1798 - RNA, 19 nt, Artificial Sequence
  Synthetic
ucucagggacccagacaga

SEQ ID NO: 1799 - RNA, 19 nt, Artificial Sequence
  Synthetic
ccagacagauggacuuaca

SEQ ID NO: 1800 - RNA, 19 nt, Artificial Sequence
  Synthetic
cggcagccaccuucugaaa

SEQ ID NO: 1801 - RNA, 19 nt, Artificial Sequence
  Synthetic
guggaggaaucgcucacaa

SEQ ID NO: 1802 - RNA, 19 nt, Artificial Sequence
  Synthetic
gcacauagaggaugaaaag

SEQ ID NO: 1803 - RNA, 19 nt, Artificial Sequence
  Synthetic
acaaugaugucgaucugau

SEQ ID NO: 1804 - RNA, 19 nt, Artificial Sequence
  Synthetic
aggaaucgcucacaaagau

SEQ ID NO: 1805 - RNA, 19 nt, Artificial Sequence
  Synthetic
gcauuggcacggacgucua

SEQ ID NO: 1806 - RNA, 19 nt, Artificial Sequence
  Synthetic
uggaugaccacaaggaugu

SEQ ID NO: 1807 - RNA, 19 nt, Artificial Sequence
  Synthetic
caacaaugaugucgaucug

SEQ ID NO: 1808 - RNA, 19 nt, Artificial Sequence
  Synthetic
caccaaagaagauuauuga

SEQ ID NO: 1809 - RNA, 19 nt, Artificial Sequence
  Synthetic
gcauguuggccacgcauca

SEQ ID NO: 1810 - RNA, 19 nt, Artificial Sequence
  Synthetic
cggagaggcugaagaagaa

SEQ ID NO: 1811 - RNA, 19 nt, Artificial Sequence
  Synthetic
gaacgaggaauuugagaua

SEQ ID NO: 1812 - RNA, 19 nt, Artificial Sequence
  Synthetic
ggauuuaagcagaguucaa

SEQ ID NO: 1813 - RNA, 19 nt, Artificial Sequence
  Synthetic
gcaccaagcucaagaagca

SEQ ID NO: 1814 - RNA, 19 nt, Artificial Sequence
  Synthetic
aaguaaagcucucggucaa

SEQ ID NO: 1815 - RNA, 19 nt, Artificial Sequence
  Synthetic
agaaggaggcagucaauaa

SEQ ID NO: 1816 - RNA, 19 nt, Artificial Sequence
  Synthetic
cagaagaaguguuucagaa

SEQ ID NO: 1817 - RNA, 19 nt, Artificial Sequence
  Synthetic
gaagcagagcggaggcaaa

SEQ ID NO: 1818 - RNA, 19 nt, Artificial Sequence
  Synthetic
ugaaugggaucgaaguaaa

SEQ ID NO: 1819 - RNA, 19 nt, Artificial Sequence
  Synthetic
cgugcagaguggagggaga

SEQ ID NO: 1820 - RNA, 19 nt, Artificial Sequence
  Synthetic
gagagaagagggcgaacaa

SEQ ID NO: 1821 - RNA, 19 nt, Artificial Sequence
  Synthetic
gcauggaggaggugggcau

SEQ ID NO: 1822 - RNA, 19 nt, Artificial Sequence
  Synthetic
caaacuggaacgaggaauu

SEQ ID NO: 1823 - RNA, 19 nt, Artificial Sequence
  Synthetic
gcagauggcucguucggaa

SEQ ID NO: 1824 - RNA, 19 nt, Artificial Sequence
  Synthetic
caacaaagaugccaaggau

SEQ ID NO: 1825 - RNA, 19 nt, Artificial Sequence
  Synthetic
gguccaacuucgagcggau

SEQ ID NO: 1826 - RNA, 19 nt, Artificial Sequence
  Synthetic
gggacacagcugagccaaa

SEQ ID NO: 1827 - RNA, 19 nt, Artificial Sequence
  Synthetic
uggugaaggucaacgacaa

SEQ ID NO: 1828 - RNA, 19 nt, Artificial Sequence
  Synthetic
ggugaaggucaacgacaaa

SEQ ID NO: 1829 - RNA, 19 nt, Artificial Sequence
  Synthetic
accaagaacucucuggaaa

SEQ ID NO: 1830 - RNA, 19 nt, Artificial Sequence
  Synthetic
ccuggaaaccucuggcuaa

SEQ ID NO: 1831 - RNA, 19 nt, Artificial Sequence
  Synthetic
ucaaagugccugagcucua

SEQ ID NO: 1832 - RNA, 19 nt, Artificial Sequence
  Synthetic
gggccuucguggacaacua

SEQ ID NO: 1833 - RNA, 19 nt, Artificial Sequence
  Synthetic
acggagaggcugaagaaga

SEQ ID NO: 1834 - RNA, 19 nt, Artificial Sequence
  Synthetic
agaagaagcugucggagca

SEQ ID NO: 1835 - RNA, 19 nt, Artificial Sequence
  Synthetic
cagcagaagaaguguuuca

SEQ ID NO: 1836 - RNA, 19 nt, Artificial Sequence
  Synthetic
ucaauaaggaagaugauga

SEQ ID NO: 1837 - RNA, 19 nt, Artificial Sequence
  Synthetic
agagugacauccagagaga

SEQ ID NO: 1838 - RNA, 19 nt, Artificial Sequence
  Synthetic
gagcaggagaagcgccuua

SEQ ID NO: 1839 - RNA, 19 nt, Artificial Sequence
  Synthetic
uggcuagcgaggagacuua

SEQ ID NO: 1840 - RNA, 19 nt, Artificial Sequence
  Synthetic
uuuaaugaguggugacaua

SEQ ID NO: 1841 - RNA, 19 nt, Artificial Sequence
  Synthetic
ggaacauagaccugauaua

SEQ ID NO: 1842 - RNA, 19 nt, Artificial Sequence
  Synthetic
gcaccaagacaaagaccaa

SEQ ID NO: 1843 - RNA, 19 nt, Artificial Sequence
  Synthetic
gaaaaugccugaaagaaaa

SEQ ID NO: 1844 - RNA, 19 nt, Artificial Sequence
  Synthetic
cagaaguguuacagauauu

SEQ ID NO: 1845 - RNA, 19 nt, Artificial Sequence
  Synthetic
uugagaauguguauggaaa

SEQ ID NO: 1846 - RNA, 19 nt, Artificial Sequence
  Synthetic
caaauuauguugugugcau

SEQ ID NO: 1847 - RNA, 19 nt, Artificial Sequence
  Synthetic
auaaagaggccauugcaaa

SEQ ID NO: 1848 - RNA, 19 nt, Artificial Sequence
  Synthetic
guguaagacuccaauaauu

SEQ ID NO: 1849 - RNA, 19 nt, Artificial Sequence
  Synthetic
ccaaauaaaagccagaaua

SEQ ID NO: 1850 - RNA, 19 nt, Artificial Sequence
  Synthetic
cuauguacuuugugacuuu

SEQ ID NO: 1851 - RNA, 19 nt, Artificial Sequence
  Synthetic
uaaguuaacagaagaggaa

SEQ ID NO: 1852 - RNA, 19 nt, Artificial Sequence
  Synthetic
cgaucaaagagaaggacaa

SEQ ID NO: 1853 - RNA, 19 nt, Artificial Sequence
  Synthetic
ggaaggaggcugagaggca

SEQ ID NO: 1854 - RNA, 19 nt, Artificial Sequence
  Synthetic
cugaagagcuauggugaaa

SEQ ID NO: 1855 - RNA, 19 nt, Artificial Sequence
  Synthetic
gggacuggcuuuugcuuua

SEQ ID NO: 1856 - RNA, 19 nt, Artificial Sequence
  Synthetic
uggcauacauugagcgcau

SEQ ID NO: 1857 - RNA, 19 nt, Artificial Sequence
  Synthetic
gcgaagucuggauggguua

SEQ ID NO: 1858 - RNA, 19 nt, Artificial Sequence
  Synthetic
acaugaagguggccauuaa

SEQ ID NO: 1859 - RNA, 19 nt, Artificial Sequence
  Synthetic
gaggaugccugcuggauuu

SEQ ID NO: 1860 - RNA, 19 nt, Artificial Sequence
  Synthetic
gcagauugcugaagggaug

SEQ ID NO: 1861 - RNA, 19 nt, Artificial Sequence
  Synthetic
ggucuaugccagaggcuga

SEQ ID NO: 1862 - RNA, 19 nt, Artificial Sequence
  Synthetic
ccgaugaacaccuggauga

SEQ ID NO: 1863 - RNA, 19 nt, Artificial Sequence
  Synthetic
gggagaagcuacagguccu

SEQ ID NO: 1864 - RNA, 19 nt, Artificial Sequence
  Synthetic
gaguggagagccuggaaau

SEQ ID NO: 1865 - RNA, 19 nt, Artificial Sequence
  Synthetic
aguacgagcugcagcccua

SEQ ID NO: 1866 - RNA, 19 nt, Artificial Sequence
  Synthetic
ccauuaagacgcugaagga

SEQ ID NO: 1867 - RNA, 19 nt, Artificial Sequence
  Synthetic
uggaugaagacaagcauuu

SEQ ID NO: 1868 - RNA, 19 nt, Artificial Sequence
  Synthetic
gggagcugaucaagcacua

SEQ ID NO: 1869 - RNA, 19 nt, Artificial Sequence
  Synthetic
aagagaaggacaagggcca

SEQ ID NO: 1870 - RNA, 19 nt, Artificial Sequence
  Synthetic
cuuaucagagagagugaaa

SEQ ID NO: 1871 - RNA, 19 nt, Artificial Sequence
  Synthetic
gaagagcuauggugaaaca

SEQ ID NO: 1872 - RNA, 19 nt, Artificial Sequence
  Synthetic
augaacaccuggaugaaga

SEQ ID NO: 1873 - RNA, 19 nt, Artificial Sequence
  Synthetic
aggaaaagccgaucaaaga

SEQ ID NO: 1874 - RNA, 19 nt, Artificial Sequence
  Synthetic
ucacaggaagagaaggcua

SEQ ID NO: 1875 - RNA, 19 nt, Artificial Sequence
  Synthetic
ucagagagagugaaaccaa

SEQ ID NO: 1876 - RNA, 19 nt, Artificial Sequence
  Synthetic
gguaagcgacugucaucaa

SEQ ID NO: 1877 - RNA, 19 nt, Artificial Sequence
  Synthetic
uggauuuccugaagacaga

SEQ ID NO: 1878 - RNA, 19 nt, Artificial Sequence
  Synthetic
ccaacauccuggugucuga

SEQ ID NO: 1879 - RNA, 19 nt, Artificial Sequence
  Synthetic
cuggauggguuacuacaaa

SEQ ID NO: 1880 - RNA, 19 nt, Artificial Sequence
  Synthetic
gaaacucgggucuggacaa

SEQ ID NO: 1881 - RNA, 19 nt, Artificial Sequence
  Synthetic
uugcugaagggauggcaua

SEQ ID NO: 1882 - RNA, 19 nt, Artificial Sequence
  Synthetic
caaccuuuauggagggaaa

SEQ ID NO: 1883 - RNA, 19 nt, Artificial Sequence
  Synthetic
uggaaauggcccugaaauu

SEQ ID NO: 1884 - RNA, 19 nt, Artificial Sequence
  Synthetic
gaguuaauguaguagaaga

SEQ ID NO: 1885 - RNA, 19 nt, Artificial Sequence
  Synthetic
ggacagagaauuugaccuu

SEQ ID NO: 1886 - RNA, 19 nt, Artificial Sequence
  Synthetic
cugaaaugaucaaccuuua

SEQ ID NO: 1887 - RNA, 19 nt, Artificial Sequence
  Synthetic
cugaaauuuuauuggguca

SEQ ID NO: 1888 - RNA, 19 nt, Artificial Sequence
  Synthetic
gcauagaguacuccagcaa

SEQ ID NO: 1889 - RNA, 19 nt, Artificial Sequence
  Synthetic
ucacaaaucagaagaacau

SEQ ID NO: 1890 - RNA, 19 nt, Artificial Sequence
  Synthetic
cauucaaaguucagcaaca

SEQ ID NO: 1891 - RNA, 19 nt, Artificial Sequence
  Synthetic
agacaaagaccaaaggcca

SEQ ID NO: 1892 - RNA, 19 nt, Artificial Sequence
  Synthetic
ugaaagagcuaucugguca

SEQ ID NO: 1893 - RNA, 19 nt, Artificial Sequence
  Synthetic
cuacaaugaugccgcagua

SEQ ID NO: 1894 - RNA, 19 nt, Artificial Sequence
  Synthetic
gacaaagaccaaaggccaa

SEQ ID NO: 1895 - RNA, 19 nt, Artificial Sequence
  Synthetic
cuggacagguagugaauca

SEQ ID NO: 1896 - RNA, 19 nt, Artificial Sequence
  Synthetic
agauggaguuaauguagua

SEQ ID NO: 1897 - RNA, 19 nt, Artificial Sequence
  Synthetic
gaacuauuggacagagaau

SEQ ID NO: 1898 - RNA, 19 nt, Artificial Sequence
  Synthetic
gguagugaaucaaaugaau

SEQ ID NO: 1899 - RNA, 19 nt, Artificial Sequence
  Synthetic
caguguaagacuccaauaa

SEQ ID NO: 1900 - RNA, 19 nt, Artificial Sequence
  Synthetic
cagcagagauggagaaaua

SEQ ID NO: 1901 - RNA, 19 nt, Artificial Sequence
  Synthetic
gaacaaugacucagcuaua

SEQ ID NO: 1902 - RNA, 19 nt, Artificial Sequence
  Synthetic
gggcaaauggcguggcgaa

SEQ ID NO: 1903 - RNA, 19 nt, Artificial Sequence
  Synthetic
ggaacaggaugaagcauuu

SEQ ID NO: 1904 - RNA, 19 nt, Artificial Sequence
  Synthetic
gaagaugaccagggagaaa

SEQ ID NO: 1905 - RNA, 19 nt, Artificial Sequence
  Synthetic
gugaaagccuuaagaagau

SEQ ID NO: 1906 - RNA, 19 nt, Artificial Sequence
  Synthetic
caggagggaucguggaaga

SEQ ID NO: 1907 - RNA, 19 nt, Artificial Sequence
  Synthetic
gagggaucguggaagaaua

SEQ ID NO: 1908 - RNA, 19 nt, Artificial Sequence
  Synthetic
augcauaacuaauggacau

SEQ ID NO: 1909 - RNA, 19 nt, Artificial Sequence
  Synthetic
ggaauaaggauguuaacuu

SEQ ID NO: 1910 - RNA, 19 nt, Artificial Sequence
  Synthetic
aagaauaccaauugccaua

SEQ ID NO: 1911 - RNA, 19 nt, Artificial Sequence
  Synthetic
agaaauagacuuugccuuu

SEQ ID NO: 1912 - RNA, 19 nt, Artificial Sequence
  Synthetic
gaacagugaugaaugucua

SEQ ID NO: 1913 - RNA, 19 nt, Artificial Sequence
  Synthetic
gguugaaucccaagaugua

SEQ ID NO: 1914 - RNA, 19 nt, Artificial Sequence
  Synthetic
gugcaaagauucuccaaaa

SEQ ID NO: 1915 - RNA, 19 nt, Artificial Sequence
  Synthetic
gagaaguauggaugggcaa

SEQ ID NO: 1916 - RNA, 19 nt, Artificial Sequence
  Synthetic
aagaagaugaccagggaga

SEQ ID NO: 1917 - RNA, 19 nt, Artificial Sequence
  Synthetic
aggccgauauggagaagua

SEQ ID NO: 1918 - RNA, 19 nt, Artificial Sequence
  Synthetic
ugugaaagccuuaagaaga

SEQ ID NO: 1919 - RNA, 19 nt, Artificial Sequence
  Synthetic
caucauuucucguguucaa

SEQ ID NO: 1920 - RNA, 19 nt, Artificial Sequence
  Synthetic
aagcagacgucguuacaau

SEQ ID NO: 1921 - RNA, 19 nt, Artificial Sequence
  Synthetic
gcauugagaauuaagaaga

SEQ ID NO: 1922 - RNA, 19 nt, Artificial Sequence
  Synthetic
ggacgaaagccugaacaaa

SEQ ID NO: 1923 - RNA, 19 nt, Artificial Sequence
  Synthetic
gaagugaauuccugcauuu

SEQ ID NO: 1924 - RNA, 19 nt, Artificial Sequence
  Synthetic
gagaaacucuagacugcaa

SEQ ID NO: 1925 - RNA, 19 nt, Artificial Sequence
  Synthetic
gugucuaaucgguggaaca

SEQ ID NO: 1926 - RNA, 19 nt, Artificial Sequence
  Synthetic
ucagcgaacuauugccaaa

SEQ ID NO: 1927 - RNA, 19 nt, Artificial Sequence
  Synthetic
gcaaguugguaaaggccga

SEQ ID NO: 1928 - RNA, 19 nt, Artificial Sequence
  Synthetic
gaaccaugcuuacaaagaa

SEQ ID NO: 1929 - RNA, 19 nt, Artificial Sequence
  Synthetic
ugacucagcuauacauuua

SEQ ID NO: 1930 - RNA, 19 nt, Artificial Sequence
  Synthetic
cggagaaaccguuggguaa

SEQ ID NO: 1931 - RNA, 19 nt, Artificial Sequence
  Synthetic
guucagagagacagaaaua

SEQ ID NO: 1932 - RNA, 19 nt, Artificial Sequence
  Synthetic
gagguauaguggaagaaua

SEQ ID NO: 1933 - RNA, 19 nt, Artificial Sequence
  Synthetic
cuuuaguacucaaggcaaa

SEQ ID NO: 1934 - RNA, 19 nt, Artificial Sequence
  Synthetic
cagaaaggaacgaauguaa

SEQ ID NO: 1935 - RNA, 19 nt, Artificial Sequence
  Synthetic
ugacaagagaggaaacaaa

SEQ ID NO: 1936 - RNA, 19 nt, Artificial Sequence
  Synthetic
ucuuagaugugaaaggaaa

SEQ ID NO: 1937 - RNA, 19 nt, Artificial Sequence
  Synthetic
gaaaggaacgaauguaaua

SEQ ID NO: 1938 - RNA, 19 nt, Artificial Sequence
  Synthetic
aagcaaacuuccuugauaa

SEQ ID NO: 1939 - RNA, 19 nt, Artificial Sequence
  Synthetic
ccacagggcuuuacuuaua

SEQ ID NO: 1940 - RNA, 19 nt, Artificial Sequence
  Synthetic
gaaagaggauggugagagu

SEQ ID NO: 1941 - RNA, 19 nt, Artificial Sequence
  Synthetic
gggaaguuuggaugggaaa

SEQ ID NO: 1942 - RNA, 19 nt, Artificial Sequence
  Synthetic
ggaaaguggcguggcgaaa

SEQ ID NO: 1943 - RNA, 19 nt, Artificial Sequence
  Synthetic
gagcaaaagacaucaaaua

SEQ ID NO: 1944 - RNA, 19 nt, Artificial Sequence
  Synthetic
ggauauuguuucacgauga

SEQ ID NO: 1945 - RNA, 19 nt, Artificial Sequence
  Synthetic
ucagagagacagaaauaua

SEQ ID NO: 1946 - RNA, 19 nt, Artificial Sequence
  Synthetic
ccaagaaagaggaugguga

SEQ ID NO: 1947 - RNA, 19 nt, Artificial Sequence
  Synthetic
cgaugauagaagaggauga

SEQ ID NO: 1948 - RNA, 19 nt, Artificial Sequence
  Synthetic
cgaauguaauaaagaccua

SEQ ID NO: 1949 - RNA, 19 nt, Artificial Sequence
  Synthetic
cgaaaagguagcugugaaa

SEQ ID NO: 1950 - RNA, 19 nt, Artificial Sequence
  Synthetic
gucuaaggcagaugggaaa

SEQ ID NO: 1951 - RNA, 19 nt, Artificial Sequence
  Synthetic
auugaaugcugcacagaaa

SEQ ID NO: 1952 - RNA, 19 nt, Artificial Sequence
  Synthetic
gcgaagugcaggaaaauua

SEQ ID NO: 1953 - RNA, 19 nt, Artificial Sequence
  Synthetic
gggaaaguggcguggcgaa

SEQ ID NO: 1954 - RNA, 19 nt, Artificial Sequence
  Synthetic
ggugaaacagauuggaaaa

SEQ ID NO: 1955 - RNA, 19 nt, Artificial Sequence
  Synthetic
ggagaaucccugagagacu

SEQ ID NO: 1956 - RNA, 19 nt, Artificial Sequence
  Synthetic
uggugaaacagauuggaaa

SEQ ID NO: 1957 - RNA, 19 nt, Artificial Sequence
  Synthetic
ugucuaaggcagaugggaa

SEQ ID NO: 1958 - RNA, 19 nt, Artificial Sequence
  Synthetic
gcgaaaagguagcugugaa

SEQ ID NO: 1959 - RNA, 19 nt, Artificial Sequence
  Synthetic
ugauaaagguucagacuuc

SEQ ID NO: 1960 - RNA, 19 nt, Artificial Sequence
  Synthetic
ggagagaaaugaagggaau

SEQ ID NO: 1961 - RNA, 19 nt, Artificial Sequence
  Synthetic
gauaagaaccucaaggaaa

SEQ ID NO: 1962 - RNA, 19 nt, Artificial Sequence
  Synthetic
ggacuaaucuauugggaga

SEQ ID NO: 1963 - RNA, 19 nt, Artificial Sequence
  Synthetic
cagaaauguccuagugaaa

SEQ ID NO: 1964 - RNA, 19 nt, Artificial Sequence
  Synthetic
gaucaagaaacgugugaaa

SEQ ID NO: 1965 - RNA, 19 nt, Artificial Sequence
  Synthetic
gguagaaaccacaguguua

SEQ ID NO: 1966 - RNA, 19 nt, Artificial Sequence
  Synthetic
ccaacaagcuagacccaaa

SEQ ID NO: 1967 - RNA, 19 nt, Artificial Sequence
  Synthetic
ggaagauaaugcagccaua

SEQ ID NO: 1968 - RNA, 19 nt, Artificial Sequence
  Synthetic
ggaaagcucugaugagaau

SEQ ID NO: 1969 - RNA, 19 nt, Artificial Sequence
  Synthetic
gcagaaauguccuagugaa

SEQ ID NO: 1970 - RNA, 19 nt, Artificial Sequence
  Synthetic
cuuaugaugauuugggaaa

SEQ ID NO: 1971 - RNA, 19 nt, Artificial Sequence
  Synthetic
acacauagggcccaagaaa

SEQ ID NO: 1972 - RNA, 19 nt, Artificial Sequence
  Synthetic
ugaaacaaguagacaugua

SEQ ID NO: 1973 - RNA, 19 nt, Artificial Sequence
  Synthetic
cccaagaaauguugcagaa

SEQ ID NO: 1974 - RNA, 19 nt, Artificial Sequence
  Synthetic
uggcagcaguauacagaua

SEQ ID NO: 1975 - RNA, 19 nt, Artificial Sequence
  Synthetic
cauguaugcucuuggacua

SEQ ID NO: 1976 - RNA, 19 nt, Artificial Sequence
  Synthetic
ccaugaggcugacuggaaa

SEQ ID NO: 1977 - RNA, 19 nt, Artificial Sequence
  Synthetic
gcugugaacuugagggacu

SEQ ID NO: 1978 - RNA, 19 nt, Artificial Sequence
  Synthetic
gaaugaacugucugugaaa

SEQ ID NO: 1979 - RNA, 19 nt, Artificial Sequence
  Synthetic
auauuaugcucgaaaggua

SEQ ID NO: 1980 - RNA, 19 nt, Artificial Sequence
  Synthetic
cagauggacgcauggaaua

SEQ ID NO: 1981 - RNA, 19 nt, Artificial Sequence
  Synthetic
ccagauggcuuuucagaca

SEQ ID NO: 1982 - RNA, 19 nt, Artificial Sequence
  Synthetic
ggaaugaacugucugugaa

SEQ ID NO: 1983 - RNA, 19 nt, Artificial Sequence
  Synthetic
cuacaaccauggugucuaa

SEQ ID NO: 1984 - RNA, 19 nt, Artificial Sequence
  Synthetic
acgaggagaucauuauaaa

SEQ ID NO: 1985 - RNA, 19 nt, Artificial Sequence
  Synthetic
aguagaaucucucaugaaa

SEQ ID NO: 1986 - RNA, 19 nt, Artificial Sequence
  Synthetic
cuaugaagaauguguagua

SEQ ID NO: 1987 - RNA, 19 nt, Artificial Sequence
  Synthetic
acugugaagucaacaauaa

SEQ ID NO: 1988 - RNA, 19 nt, Artificial Sequence
  Synthetic
gggauaggugagaguagaa

SEQ ID NO: 1989 - RNA, 19 nt, Artificial Sequence
  Synthetic
gugaaucagcuuugaaaca

SEQ ID NO: 1990 - RNA, 19 nt, Artificial Sequence
  Synthetic
gcuuagagcuugagaguca

SEQ ID NO: 1991 - RNA, 19 nt, Artificial Sequence
  Synthetic
gaacaaggcaggaaacaaa

SEQ ID NO: 1992 - RNA, 19 nt, Artificial Sequence
  Synthetic
auacaaaugcugagaacaa

SEQ ID NO: 1993 - RNA, 19 nt, Artificial Sequence
  Synthetic
gagcauuuaugguuagaaa

SEQ ID NO: 1994 - RNA, 19 nt, Artificial Sequence
  Synthetic
ucaaagauuucaugggaau

SEQ ID NO: 1995 - RNA, 19 nt, Artificial Sequence
  Synthetic
gaacaaaguuuccagucaa

SEQ ID NO: 1996 - RNA, 19 nt, Artificial Sequence
  Synthetic
aggaaaaccuggaugauua

SEQ ID NO: 1997 - RNA, 19 nt, Artificial Sequence
  Synthetic
ccauauacauagugacuga

SEQ ID NO: 1998 - RNA, 19 nt, Artificial Sequence
  Synthetic
gggaaaagaaggagcauuu

SEQ ID NO: 1999 - RNA, 19 nt, Artificial Sequence
  Synthetic
gaacaguuacucagacaaa

SEQ ID NO: 2000 - RNA, 19 nt, Artificial Sequence
  Synthetic
agacaagcauugaagaaga

SEQ ID NO: 2001 - RNA, 19 nt, Artificial Sequence
  Synthetic
aaucagauguguggagaaa

SEQ ID NO: 2002 - RNA, 19 nt, Artificial Sequence
  Synthetic
caucugaagaagaggaaaa

SEQ ID NO: 2003 - RNA, 19 nt, Artificial Sequence
  Synthetic
aaguaaaucucgaggagca

SEQ ID NO: 2004 - RNA, 19 nt, Artificial Sequence
  Synthetic
ugacaacgaaucaaagaaa

SEQ ID NO: 2005 - RNA, 19 nt, Artificial Sequence
  Synthetic
agucagugguugaaagcau

SEQ ID NO: 2006 - RNA, 19 nt, Artificial Sequence
  Synthetic
agacuguguucauguguaa

SEQ ID NO: 2007 - RNA, 19 nt, Artificial Sequence
  Synthetic
gaaggagcauuuaugguua

SEQ ID NO: 2008 - RNA, 19 nt, Artificial Sequence
  Synthetic
gcagacgccuguagagaga

SEQ ID NO: 2009 - RNA, 19 nt, Artificial Sequence
  Synthetic
guaccagucuagcgcaaua

SEQ ID NO: 2010 - RNA, 19 nt, Artificial Sequence
  Synthetic
agaaaaggauccauugaaa

SEQ ID NO: 2011 - RNA, 19 nt, Artificial Sequence
  Synthetic
cagucaaugaagagaaaca

SEQ ID NO: 2012 - RNA, 19 nt, Artificial Sequence
  Synthetic
gggaaauggaaucugggaa

SEQ ID NO: 2013 - RNA, 19 nt, Artificial Sequence
  Synthetic
ggaaaguagcaaggcauaa

SEQ ID NO: 2014 - RNA, 19 nt, Artificial Sequence
  Synthetic
guagcaaggcauaauguaa

SEQ ID NO: 2015 - RNA, 19 nt, Artificial Sequence
  Synthetic
gaguguguucaaaggaaua

SEQ ID NO: 2016 - RNA, 19 nt, Artificial Sequence
  Synthetic
agacugagcagaacugaaa

SEQ ID NO: 2017 - RNA, 19 nt, Artificial Sequence
  Synthetic
ggaaauggaaucugggaac

SEQ ID NO: 2018 - RNA, 19 nt, Artificial Sequence
  Synthetic
ggaguguguucaaaggaau

SEQ ID NO: 2019 - RNA, 19 nt, Artificial Sequence
  Synthetic
aaacaaaccuuuccuacua

SEQ ID NO: 2020 - RNA, 19 nt, Artificial Sequence
  Synthetic
cgugaaagccuuacagaaa

SEQ ID NO: 2021 - RNA, 19 nt, Artificial Sequence
  Synthetic
acagagaccucaagaguaa

SEQ ID NO: 2022 - RNA, 19 nt, Artificial Sequence
  Synthetic
caauauaucuggaggccua

SEQ ID NO: 2023 - RNA, 19 nt, Artificial Sequence
  Synthetic
agacaggaaucgaaugaaa

SEQ ID NO: 2024 - RNA, 19 nt, Artificial Sequence
  Synthetic
gaacagucuacaagggaaa

SEQ ID NO: 2025 - RNA, 19 nt, Artificial Sequence
  Synthetic
caucagaaugcaagauaaa

SEQ ID NO: 2026 - RNA, 19 nt, Artificial Sequence
  Synthetic
acaaagagaacaacaguua

SEQ ID NO: 2027 - RNA, 19 nt, Artificial Sequence
  Synthetic
gauuagagaccaaggauuu

SEQ ID NO: 2028 - RNA, 19 nt, Artificial Sequence
  Synthetic
uggucuagcuacagugaaa

SEQ ID NO: 2029 - RNA, 19 nt, Artificial Sequence
  Synthetic
gaaacaaaugagugagaga

SEQ ID NO: 2030 - RNA, 19 nt, Artificial Sequence
  Synthetic
caauagaaccugucaauau

SEQ ID NO: 2031 - RNA, 19 nt, Artificial Sequence
  Synthetic
gaacaacaguuauuggaau

SEQ ID NO: 2032 - RNA, 19 nt, Artificial Sequence
  Synthetic
ccggaggagguguggaaua

SEQ ID NO: 2033 - RNA, 19 nt, Artificial Sequence
  Synthetic
agaccaaauuugagaugau

SEQ ID NO: 2034 - RNA, 19 nt, Artificial Sequence
  Synthetic
caugaagaccucacaguaa

SEQ ID NO: 2035 - RNA, 19 nt, Artificial Sequence
  Synthetic
cugcacagggcauggauua

SEQ ID NO: 2036 - RNA, 19 nt, Artificial Sequence
  Synthetic
gcauaauccaccaucaaua

SEQ ID NO: 2037 - RNA, 19 nt, Artificial Sequence
  Synthetic
ggaacagucuacaagggaa

SEQ ID NO: 2038 - RNA, 19 nt, Artificial Sequence
  Synthetic
ugacuugauuagagaccaa

SEQ ID NO: 2039 - RNA, 19 nt, Artificial Sequence
  Synthetic
caccagaagucaucagaau

SEQ ID NO: 2040 - RNA, 19 nt, Artificial Sequence
  Synthetic
ccugcaagguguggaguua

SEQ ID NO: 2041 - RNA, 19 nt, Artificial Sequence
  Synthetic
auguggaaguguuggagaa

SEQ ID NO: 2042 - RNA, 19 nt, Artificial Sequence
  Synthetic
uggaaguguuggagaaugu

SEQ ID NO: 2043 - RNA, 19 nt, Artificial Sequence
  Synthetic
cggaggagguguggaauau

SEQ ID NO: 2044 - RNA, 19 nt, Artificial Sequence
  Synthetic
acugauauuuccuggcuua

SEQ ID NO: 2045 - RNA, 19 nt, Artificial Sequence
  Synthetic
gugaaagccuuacagaaau

SEQ ID NO: 2046 - RNA, 19 nt, Artificial Sequence
  Synthetic
acuccaacaaagagaacaa

SEQ ID NO: 2047 - RNA, 19 nt, Artificial Sequence
  Synthetic
cuggcuuacuggagaagaa

SEQ ID NO: 2048 - RNA, 19 nt, Artificial Sequence
  Synthetic
gggacaaagaauuggaucu

SEQ ID NO: 2049 - RNA, 19 nt, Artificial Sequence
  Synthetic
augaagaccucacaguaaa

SEQ ID NO: 2050 - RNA, 19 nt, Artificial Sequence
  Synthetic
caagaaagcgaaugagaaa

SEQ ID NO: 2051 - RNA, 19 nt, Artificial Sequence
  Synthetic
cagaagagauugagauuga

SEQ ID NO: 2052 - RNA, 19 nt, Artificial Sequence
  Synthetic
uuaagaagccugugggaaa

SEQ ID NO: 2053 - RNA, 19 nt, Artificial Sequence
  Synthetic
gcucagacucagaggaaga

SEQ ID NO: 2054 - RNA, 19 nt, Artificial Sequence
  Synthetic
ggaacuggcuuuggagaaa

SEQ ID NO: 2055 - RNA, 19 nt, Artificial Sequence
  Synthetic
uagcagaacuacaggaaca

SEQ ID NO: 2056 - RNA, 19 nt, Artificial Sequence
  Synthetic
uuagagagcuugagcgcua

SEQ ID NO: 2057 - RNA, 19 nt, Artificial Sequence
  Synthetic
gaggaagaagagagugaaa

SEQ ID NO: 2058 - RNA, 19 nt, Artificial Sequence
  Synthetic
auucagaggaggaggaaga

SEQ ID NO: 2059 - RNA, 19 nt, Artificial Sequence
  Synthetic
ccaagaaagcgaaugagaa

SEQ ID NO: 2060 - RNA, 19 nt, Artificial Sequence
  Synthetic
aggaggaagaagagaguga

SEQ ID NO: 2061 - RNA, 19 nt, Artificial Sequence
  Synthetic
uggacaagcagcagcguua

SEQ ID NO: 2062 - RNA, 19 nt, Artificial Sequence
  Synthetic
ggcaauggcacgaaagcua

SEQ ID NO: 2063 - RNA, 19 nt, Artificial Sequence
  Synthetic
agaaagggcucaucgcuua

SEQ ID NO: 2064 - RNA, 19 nt, Artificial Sequence
  Synthetic
gaggaaaguagcagugaga

SEQ ID NO: 2065 - RNA, 19 nt, Artificial Sequence
  Synthetic
caacaacaccagagcucua

SEQ ID NO: 2066 - RNA, 19 nt, Artificial Sequence
  Synthetic
caagaaagcaaguggcagu

SEQ ID NO: 2067 - RNA, 19 nt, Artificial Sequence
  Synthetic
gcguaaagcggaaagcaga

SEQ ID NO: 2068 - RNA, 19 nt, Artificial Sequence
  Synthetic
gggaaagacaaaggaggaa

SEQ ID NO: 2069 - RNA, 19 nt, Artificial Sequence
  Synthetic
agagcaggcccaugaguua

SEQ ID NO: 2070 - RNA, 19 nt, Artificial Sequence
  Synthetic
ccuaagaaguccaagaaag

SEQ ID NO: 2071 - RNA, 19 nt, Artificial Sequence
  Synthetic
ggaguuugcugcugaugua

SEQ ID NO: 2072 - RNA, 19 nt, Artificial Sequence
  Synthetic
gaugaaggcucuguggaaa

SEQ ID NO: 2073 - RNA, 19 nt, Artificial Sequence
  Synthetic
caucaaugccacaagaaga

SEQ ID NO: 2074 - RNA, 19 nt, Artificial Sequence
  Synthetic
agaagaaacggaaggcaga

SEQ ID NO: 2075 - RNA, 19 nt, Artificial Sequence
  Synthetic
ggacaaaacaacauugaau

SEQ ID NO: 2076 - RNA, 19 nt, Artificial Sequence
  Synthetic
gaaggagggacauggacaa

SEQ ID NO: 2077 - RNA, 19 nt, Artificial Sequence
  Synthetic
ugaugaaggcucuguggaa

SEQ ID NO: 2078 - RNA, 19 nt, Artificial Sequence
  Synthetic
acaccagagcucuaagaaa

SEQ ID NO: 2079 - RNA, 19 nt, Artificial Sequence
  Synthetic
uacacaagguagugaugaa

SEQ ID NO: 2080 - RNA, 19 nt, Artificial Sequence
  Synthetic
ggcccaagcuuuagagaaa

SEQ ID NO: 2081 - RNA, 19 nt, Artificial Sequence
  Synthetic
ccaaagaagaagaaggaga

SEQ ID NO: 2082 - RNA, 19 nt, Artificial Sequence
  Synthetic
agaagaagaaggagaagaa

SEQ ID NO: 2083 - RNA, 19 nt, Artificial Sequence
  Synthetic
agaagaaggacaaggagaa

SEQ ID NO: 2084 - RNA, 19 nt, Artificial Sequence
  Synthetic
gagaagaagaagaaggaca

SEQ ID NO: 2085 - RNA, 19 nt, Artificial Sequence
  Synthetic
agaagaaggagaaggagaa

SEQ ID NO: 2086 - RNA, 19 nt, Artificial Sequence
  Synthetic
caaagaagaagaaggagaa

SEQ ID NO: 2087 - RNA, 19 nt, Artificial Sequence
  Synthetic
gagaagaaggagaaggaga

SEQ ID NO: 2088 - RNA, 19 nt, Artificial Sequence
  Synthetic
agaagaagaagaaggacaa

SEQ ID NO: 2089 - RNA, 19 nt, Artificial Sequence
  Synthetic
ggauauggguacuguauuu

SEQ ID NO: 2090 - RNA, 19 nt, Artificial Sequence
  Synthetic
ccaagaggaaguugaauua

SEQ ID NO: 2091 - RNA, 19 nt, Artificial Sequence
  Synthetic
agaaggagaaggagaagaa

SEQ ID NO: 2092 - RNA, 19 nt, Artificial Sequence
  Synthetic
gcuaauggcccaagcuuua

SEQ ID NO: 2093 - RNA, 19 nt, Artificial Sequence
  Synthetic
aggagaaggagaagaagaa

SEQ ID NO: 2094 - RNA, 19 nt, Artificial Sequence
  Synthetic
aggagaaggagaaggagaa

SEQ ID NO: 2095 - RNA, 19 nt, Artificial Sequence
  Synthetic
aagugaaggccgaggaaga

SEQ ID NO: 2096 - RNA, 19 nt, Artificial Sequence
  Synthetic
aggacaaggagaaggagaa

SEQ ID NO: 2097 - RNA, 19 nt, Artificial Sequence
  Synthetic
cgaagaaccuuguggaauc

SEQ ID NO: 2098 - RNA, 19 nt, Artificial Sequence
  Synthetic
ugcgggaacuggagagaua

SEQ ID NO: 2099 - RNA, 19 nt, Artificial Sequence
  Synthetic
agaaggagaagaagaagaa

SEQ ID NO: 2100 - RNA, 19 nt, Artificial Sequence
  Synthetic
gagaaggagaagaagaaga

SEQ ID NO: 2101 - RNA, 19 nt, Artificial Sequence
  Synthetic
agaagaaggagcuggaaaa

SEQ ID NO: 2102 - RNA, 19 nt, Artificial Sequence
  Synthetic
aggagaaggagaagcacaa

SEQ ID NO: 2103 - RNA, 19 nt, Artificial Sequence
  Synthetic
aggaagagaagaaggccaa

SEQ ID NO: 2104 - RNA, 19 nt, Artificial Sequence
  Synthetic
cgagauagaaauugacuuu

SEQ ID NO: 2105 - RNA, 19 nt, Artificial Sequence
  Synthetic
gcguuagacuugaugagaa

SEQ ID NO: 2106 - RNA, 19 nt, Artificial Sequence
  Synthetic
agaaggagaagaaggagaa

SEQ ID NO: 2107 - RNA, 19 nt, Artificial Sequence
  Synthetic
aggccgaggaagagaagaa

SEQ ID NO: 2108 - RNA, 19 nt, Artificial Sequence
  Synthetic
aagaagaaggagcuggaaa

SEQ ID NO: 2109 - RNA, 19 nt, Artificial Sequence
  Synthetic
aaggaaaugucucggauau

SEQ ID NO: 2110 - RNA, 19 nt, Artificial Sequence
  Synthetic
aggaaguggaagagaauaa

SEQ ID NO: 2111 - RNA, 19 nt, Artificial Sequence
  Synthetic
gcucaagacacuauggaaa

SEQ ID NO: 2112 - RNA, 19 nt, Artificial Sequence
  Synthetic
gcacaaaagaaaagaggaa

SEQ ID NO: 2113 - RNA, 19 nt, Artificial Sequence
  Synthetic
ggacgugggaggaaagaaa

SEQ ID NO: 2114 - RNA, 19 nt, Artificial Sequence
  Synthetic
gaaaagaggaaguggaaga

SEQ ID NO: 2115 - RNA, 19 nt, Artificial Sequence
  Synthetic
ugagaaaguugaugugauu

SEQ ID NO: 2116 - RNA, 19 nt, Artificial Sequence
  Synthetic
aggaagaggacaagugcaa

SEQ ID NO: 2117 - RNA, 19 nt, Artificial Sequence
  Synthetic
gaggaaagaaacagggaca

SEQ ID NO: 2118 - RNA, 19 nt, Artificial Sequence
  Synthetic
ugacaaggacaaacagaaa

SEQ ID NO: 2119 - RNA, 19 nt, Artificial Sequence
  Synthetic
auaaagaagcgcuuggaaa

SEQ ID NO: 2120 - RNA, 19 nt, Artificial Sequence
  Synthetic
cagaagaaaccgagaucau

SEQ ID NO: 2121 - RNA, 19 nt, Artificial Sequence
  Synthetic
cguaugagucggaggaaga

SEQ ID NO: 2122 - RNA, 19 nt, Artificial Sequence
  Synthetic
agaagggagugaagaggaa

SEQ ID NO: 2123 - RNA, 19 nt, Artificial Sequence
  Synthetic
agucggaggaagaggacaa

SEQ ID NO: 2124 - RNA, 19 nt, Artificial Sequence
  Synthetic
aagaggaaguggaagagaa

SEQ ID NO: 2125 - RNA, 19 nt, Artificial Sequence
  Synthetic
ccuccaagaugaagggcuu

SEQ ID NO: 2126 - RNA, 19 nt, Artificial Sequence
  Synthetic
ucaugauaguccaggcaaa

SEQ ID NO: 2127 - RNA, 19 nt, Artificial Sequence
  Synthetic
ccaaaugucuacacaguau

SEQ ID NO: 2128 - RNA, 19 nt, Artificial Sequence
  Synthetic
gcagaacaaaccaaagaaa

SEQ ID NO: 2129 - RNA, 19 nt, Artificial Sequence
  Synthetic
gcaacagcaaugugagcaa

SEQ ID NO: 2130 - RNA, 19 nt, Artificial Sequence
  Synthetic
gaacaauaaagaagcgcuu

SEQ ID NO: 2131 - RNA, 19 nt, Artificial Sequence
  Synthetic
gggccagccuagugcagaa

SEQ ID NO: 2132 - RNA, 19 nt, Artificial Sequence
  Synthetic
uaaagaagcgcuuggaaaa

SEQ ID NO: 2133 - RNA, 19 nt, Artificial Sequence
  Synthetic
agaccaaccaacugcaaua

SEQ ID NO: 2134 - RNA, 19 nt, Artificial Sequence
  Synthetic
gcgaagacuccgaaacaga

SEQ ID NO: 2135 - RNA, 19 nt, Artificial Sequence
  Synthetic
acaugaauuuccagaguga

SEQ ID NO: 2136 - RNA, 19 nt, Artificial Sequence
  Synthetic
gugcauuuccaaagcuuaa

SEQ ID NO: 2137 - RNA, 19 nt, Artificial Sequence
  Synthetic
agaggaaguggaagagaau

SEQ ID NO: 2138 - RNA, 19 nt, Artificial Sequence
  Synthetic
cuaacaagcccaagaggca

SEQ ID NO: 2139 - RNA, 19 nt, Artificial Sequence
  Synthetic
aggaauguauccaggacuu

SEQ ID NO: 2140 - RNA, 19 nt, Artificial Sequence
  Synthetic
aggaaaaguccaagagaaa

SEQ ID NO: 2141 - RNA, 19 nt, Artificial Sequence
  Synthetic
ucucaaagaccgugauuua

SEQ ID NO: 2142 - RNA, 19 nt, Artificial Sequence
  Synthetic
caaaugaggcuaaaggaaa

SEQ ID NO: 2143 - RNA, 19 nt, Artificial Sequence
  Synthetic
caucagaagcucaagauaa

SEQ ID NO: 2144 - RNA, 19 nt, Artificial Sequence
  Synthetic
agaaaugcuugcaaagaaa

SEQ ID NO: 2145 - RNA, 19 nt, Artificial Sequence
  Synthetic
cuaaagagcauguaaagaa

SEQ ID NO: 2146 - RNA, 19 nt, Artificial Sequence
  Synthetic
gcaaaugaggcuaaaggaa

SEQ ID NO: 2147 - RNA, 19 nt, Artificial Sequence
  Synthetic
gaacaagagaggaggagga

SEQ ID NO: 2148 - RNA, 19 nt, Artificial Sequence
  Synthetic
gagaagagcagaaagaaca

SEQ ID NO: 2149 - RNA, 19 nt, Artificial Sequence
  Synthetic
gcaucaacacuaagagaau

SEQ ID NO: 2150 - RNA, 19 nt, Artificial Sequence
  Synthetic
guauuuaagcagcaagaaa

SEQ ID NO: 2151 - RNA, 19 nt, Artificial Sequence
  Synthetic
agagauagacuuugaaaca

SEQ ID NO: 2152 - RNA, 19 nt, Artificial Sequence
  Synthetic
cugaugagauagagauaga

SEQ ID NO: 2153 - RNA, 19 nt, Artificial Sequence
  Synthetic
gagaaaucagccaaagaaa

SEQ ID NO: 2154 - RNA, 19 nt, Artificial Sequence
  Synthetic
aagaaaugcuugcaaagaa

SEQ ID NO: 2155 - RNA, 19 nt, Artificial Sequence
  Synthetic
gauaggauauugugugcaa

SEQ ID NO: 2156 - RNA, 19 nt, Artificial Sequence
  Synthetic
aucagaagcucaagauaaa

SEQ ID NO: 2157 - RNA, 19 nt, Artificial Sequence
  Synthetic
auggaaaaguuuaggcaaa

SEQ ID NO: 2158 - RNA, 19 nt, Artificial Sequence
  Synthetic
guacagaaggauauaaaga

SEQ ID NO: 2159 - RNA, 19 nt, Artificial Sequence
  Synthetic
aguuaaagcaaguagugaa

SEQ ID NO: 2160 - RNA, 19 nt, Artificial Sequence
  Synthetic
ggaacaaaauacaaaggaa

SEQ ID NO: 2161 - RNA, 19 nt, Artificial Sequence
  Synthetic
gauugaaccuguugagagu

SEQ ID NO: 2162 - RNA, 19 nt, Artificial Sequence
  Synthetic
caagaaugcuucaggaugu

SEQ ID NO: 2163 - RNA, 19 nt, Artificial Sequence
  Synthetic
gcgaguaguucacauaaua

SEQ ID NO: 2164 - RNA, 19 nt, Artificial Sequence
  Synthetic
uugcaaagcuucaggagca

SEQ ID NO: 2165 - RNA, 19 nt, Artificial Sequence
  Synthetic
aaaugaggcuaaaggaaaa

SEQ ID NO: 2166 - RNA, 19 nt, Artificial Sequence
  Synthetic
ccauagaaaaggaaguaaa

SEQ ID NO: 2167 - RNA, 19 nt, Artificial Sequence
  Synthetic
ucagagggaucuugggaau

SEQ ID NO: 2168 - RNA, 19 nt, Artificial Sequence
  Synthetic
augcuaaaccuaugaacua

SEQ ID NO: 2169 - RNA, 19 nt, Artificial Sequence
  Synthetic
guuaaagcaaguagugaau

SEQ ID NO: 2170 - RNA, 19 nt, Artificial Sequence
  Synthetic
ggugaagaguccagugaaa

SEQ ID NO: 2171 - RNA, 19 nt, Artificial Sequence
  Synthetic
gcagaagacuccauagaaa

SEQ ID NO: 2172 - RNA, 19 nt, Artificial Sequence
  Synthetic
uggaauaccuggagucaaa

SEQ ID NO: 2173 - RNA, 19 nt, Artificial Sequence
  Synthetic
ggauacggaucaugggaaa

SEQ ID NO: 2174 - RNA, 19 nt, Artificial Sequence
  Synthetic
guggagagcacgagauaaa

SEQ ID NO: 2175 - RNA, 19 nt, Artificial Sequence
  Synthetic
caauagauguugagaagau

SEQ ID NO: 2176 - RNA, 19 nt, Artificial Sequence
  Synthetic
gaacaggaauggaagcuua

SEQ ID NO: 2177 - RNA, 19 nt, Artificial Sequence
  Synthetic
gcggaagggugaugaauau

SEQ ID NO: 2178 - RNA, 19 nt, Artificial Sequence
  Synthetic
gauaguggcuucugagcaa

SEQ ID NO: 2179 - RNA, 19 nt, Artificial Sequence
  Synthetic
ccagugaaauggagcaaau

SEQ ID NO: 2180 - RNA, 19 nt, Artificial Sequence
  Synthetic
cgaucaaggaguuguuaaa

SEQ ID NO: 2181 - RNA, 19 nt, Artificial Sequence
  Synthetic
gguaaacgaucaaggaguu

SEQ ID NO: 2182 - RNA, 19 nt, Artificial Sequence
  Synthetic
gguagugaaguaugggaaa

SEQ ID NO: 2183 - RNA, 19 nt, Artificial Sequence
  Synthetic
caggugaacuccagaaaga

SEQ ID NO: 2184 - RNA, 19 nt, Artificial Sequence
  Synthetic
gaauuaagacagacugaau

SEQ ID NO: 2185 - RNA, 19 nt, Artificial Sequence
  Synthetic
gaauuuggcaagaaugaaa

SEQ ID NO: 2186 - RNA, 19 nt, Artificial Sequence
  Synthetic
acacauugcccaaggccua

SEQ ID NO: 2187 - RNA, 19 nt, Artificial Sequence
  Synthetic
agacugaauuugcgaugaa

SEQ ID NO: 2188 - RNA, 19 nt, Artificial Sequence
  Synthetic
gggagaagaggcaguaaga

SEQ ID NO: 2189 - RNA, 19 nt, Artificial Sequence
  Synthetic
gagaagaggcaguaagaag

SEQ ID NO: 2190 - RNA, 19 nt, Artificial Sequence
  Synthetic
gcucaaauauccagugucu

SEQ ID NO: 2191 - RNA, 19 nt, Artificial Sequence
  Synthetic
uagaaauguaugaguggua

SEQ ID NO: 2192 - RNA, 19 nt, Artificial Sequence
  Synthetic
ucaaggaguuguuaaagua

SEQ ID NO: 2193 - RNA, 19 nt, Artificial Sequence
  Synthetic
gaagaugccauaugagaga

SEQ ID NO: 2194 - RNA, 19 nt, Artificial Sequence
  Synthetic
gaagaucacuuguguugaa

SEQ ID NO: 2195 - RNA, 19 nt, Artificial Sequence
  Synthetic
cagugauucuggagagcau

SEQ ID NO: 2196 - RNA, 19 nt, Artificial Sequence
  Synthetic
ggguagugaaguaugggaa

SEQ ID NO: 2197 - RNA, 19 nt, Artificial Sequence
  Synthetic
cagaagacuccauagaaau

SEQ ID NO: 2198 - RNA, 19 nt, Artificial Sequence
  Synthetic
cugaacuaccugagggaga

SEQ ID NO: 2199 - RNA, 19 nt, Artificial Sequence
  Synthetic
gagaagaggugaagagucc

SEQ ID NO: 2200 - RNA, 19 nt, Artificial Sequence
  Synthetic
ggaagaagaucuagaugua

SEQ ID NO: 2201 - RNA, 19 nt, Artificial Sequence
  Synthetic
gaauaugaagcuagagaaa

SEQ ID NO: 2202 - RNA, 19 nt, Artificial Sequence
  Synthetic
gagcagaaaugcagaaaca

SEQ ID NO: 2203 - RNA, 19 nt, Artificial Sequence
  Synthetic
acuaaagagcaaagggaaa

SEQ ID NO: 2204 - RNA, 19 nt, Artificial Sequence
  Synthetic
uugaagagauggagaagaa

SEQ ID NO: 2205 - RNA, 19 nt, Artificial Sequence
  Synthetic
agaaagagcuguagaagca

SEQ ID NO: 2206 - RNA, 19 nt, Artificial Sequence
  Synthetic
cagaaagccuggaaaggaa

SEQ ID NO: 2207 - RNA, 19 nt, Artificial Sequence
  Synthetic
gcaaugagccuuuggauau

SEQ ID NO: 2208 - RNA, 19 nt, Artificial Sequence
  Synthetic
gagaagaagcuaaaagaaa

SEQ ID NO: 2209 - RNA, 19 nt, Artificial Sequence
  Synthetic
ucuucaaauuccugagaaa

SEQ ID NO: 2210 - RNA, 19 nt, Artificial Sequence
  Synthetic
gauggugaauuguggaaua

SEQ ID NO: 2211 - RNA, 19 nt, Artificial Sequence
  Synthetic
agaaagaagaagaggagga

SEQ ID NO: 2212 - RNA, 19 nt, Artificial Sequence
  Synthetic
aagaaacucugcagaauua

SEQ ID NO: 2213 - RNA, 19 nt, Artificial Sequence
  Synthetic
uagcugaacuaaagagcaa

SEQ ID NO: 2214 - RNA, 19 nt, Artificial Sequence
  Synthetic
ccaaaauauuucugagcua

SEQ ID NO: 2215 - RNA, 19 nt, Artificial Sequence
  Synthetic
uaggaaagcagaugcgaua

SEQ ID NO: 2216 - RNA, 19 nt, Artificial Sequence
  Synthetic
caauacagcuucacugaua

SEQ ID NO: 2217 - RNA, 19 nt, Artificial Sequence
  Synthetic
ggaacaaccucauucuaaa

SEQ ID NO: 2218 - RNA, 19 nt, Artificial Sequence
  Synthetic
agaaagagaagaugaugua

SEQ ID NO: 2219 - RNA, 19 nt, Artificial Sequence
  Synthetic
augaaugggaacugaguaa

SEQ ID NO: 2220 - RNA, 19 nt, Artificial Sequence
  Synthetic
cagaaauaguccaugguga

SEQ ID NO: 2221 - RNA, 19 nt, Artificial Sequence
  Synthetic
ucucaugggcagaagaaua

SEQ ID NO: 2222 - RNA, 19 nt, Artificial Sequence
  Synthetic
gaagauuuaugcaggagua

SEQ ID NO: 2223 - RNA, 19 nt, Artificial Sequence
  Synthetic
gagaagaaagagaagauga

SEQ ID NO: 2224 - RNA, 19 nt, Artificial Sequence
  Synthetic
aagaagaagaggaggaagu

SEQ ID NO: 2225 - RNA, 19 nt, Artificial Sequence
  Synthetic
acuaaugagacuucagaaa

SEQ ID NO: 2226 - RNA, 19 nt, Artificial Sequence
  Synthetic
cuggaaaggaagaaggaga

SEQ ID NO: 2227 - RNA, 19 nt, Artificial Sequence
  Synthetic
gaacaaagccuuauggaag

SEQ ID NO: 2228 - RNA, 19 nt, Artificial Sequence
  Synthetic
gacaaaagauccuggcuaa

SEQ ID NO: 2229 - RNA, 19 nt, Artificial Sequence
  Synthetic
gagaauaccuaauauguga

SEQ ID NO: 2230 - RNA, 19 nt, Artificial Sequence
  Synthetic
gaaaggaaguagacaguau

SEQ ID NO: 2231 - RNA, 19 nt, Artificial Sequence
  Synthetic
ggguuaagagggaaagaua

SEQ ID NO: 2232 - RNA, 19 nt, Artificial Sequence
  Synthetic
acuuaaagaugcuucgaaa

SEQ ID NO: 2233 - RNA, 19 nt, Artificial Sequence
  Synthetic
gaaaggguuaagagggaaa

SEQ ID NO: 2234 - RNA, 19 nt, Artificial Sequence
  Synthetic
ugacagagagcgaauagaa

SEQ ID NO: 2235 - RNA, 19 nt, Artificial Sequence
  Synthetic
aguaguaacuguccauuua

SEQ ID NO: 2236 - RNA, 19 nt, Artificial Sequence
  Synthetic
gcauauuuggugaccuuaa

SEQ ID NO: 2237 - RNA, 19 nt, Artificial Sequence
  Synthetic
ggaaguagacaguauuaca

SEQ ID NO: 2238 - RNA, 19 nt, Artificial Sequence
  Synthetic
ccaaguauuugaaucguuu

SEQ ID NO: 2239 - RNA, 19 nt, Artificial Sequence
  Synthetic
ccaaucaacuucauaggau

SEQ ID NO: 2240 - RNA, 19 nt, Artificial Sequence
  Synthetic
agauaaagaccaaucaacu

SEQ ID NO: 2241 - RNA, 19 nt, Artificial Sequence
  Synthetic
gcagaaaggcuuccagaug

SEQ ID NO: 2242 - RNA, 19 nt, Artificial Sequence
  Synthetic
gaccuuaaguguacagaac

SEQ ID NO: 2243 - RNA, 19 nt, Artificial Sequence
  Synthetic
ggaaagauacugcccaagu

SEQ ID NO: 2244 - RNA, 19 nt, Artificial Sequence
  Synthetic
aaggaaguagacaguauua

SEQ ID NO: 2245 - RNA, 19 nt, Artificial Sequence
  Synthetic
cauccagacuugaaacaua

SEQ ID NO: 2246 - RNA, 19 nt, Artificial Sequence
  Synthetic
cugcauauuuggugaccuu

SEQ ID NO: 2247 - RNA, 19 nt, Artificial Sequence
  Synthetic
gauaaagaccaaucaacuu

SEQ ID NO: 2248 - RNA, 19 nt, Artificial Sequence
  Synthetic
gagauuaguuuuaguugca

SEQ ID NO: 2249 - RNA, 19 nt, Artificial Sequence
  Synthetic
uuucuuggcgcuuggaaua

SEQ ID NO: 2250 - RNA, 19 nt, Artificial Sequence
  Synthetic
acacaaagcagaagguuau

SEQ ID NO: 2251 - RNA, 19 nt, Artificial Sequence
  Synthetic
gugaaauacagguaaugaa

SEQ ID NO: 2252 - RNA, 19 nt, Artificial Sequence
  Synthetic
gggagaaugugaagauauc

SEQ ID NO: 2253 - RNA, 19 nt, Artificial Sequence
  Synthetic
uugaauggauccagcgcua

SEQ ID NO: 2254 - RNA, 19 nt, Artificial Sequence
  Synthetic
caccaauccuugcaaauua

SEQ ID NO: 2255 - RNA, 19 nt, Artificial Sequence
  Synthetic
uacacaaagcagaagguua

SEQ ID NO: 2256 - RNA, 19 nt, Artificial Sequence
  Synthetic
gggagaugucuuagaggca

SEQ ID NO: 2257 - RNA, 19 nt, Artificial Sequence
  Synthetic
uaaugaaagucuugcggca

SEQ ID NO: 2258 - RNA, 19 nt, Artificial Sequence
  Synthetic
ugggagaaugugaagauau

SEQ ID NO: 2259 - RNA, 19 nt, Artificial Sequence
  Synthetic
ggucgguauaugaggcuuu

SEQ ID NO: 2260 - RNA, 19 nt, Artificial Sequence
  Synthetic
gagcacaucucgaguauac

SEQ ID NO: 2261 - RNA, 19 nt, Artificial Sequence
  Synthetic
gcuccuaugggucgguaua

SEQ ID NO: 2262 - RNA, 19 nt, Artificial Sequence
  Synthetic
agaagaaggccucugauga

SEQ ID NO: 2263 - RNA, 19 nt, Artificial Sequence
  Synthetic
uaagagagacucagaagga

SEQ ID NO: 2264 - RNA, 19 nt, Artificial Sequence
  Synthetic
augaaagucuugcggcaca

SEQ ID NO: 2265 - RNA, 19 nt, Artificial Sequence
  Synthetic
uggacaagugggagaaugu

SEQ ID NO: 2266 - RNA, 19 nt, Artificial Sequence
  Synthetic
ccaagauggugccuucuaa

SEQ ID NO: 2267 - RNA, 19 nt, Artificial Sequence
  Synthetic
gauaucagacuuuggcuuu

SEQ ID NO: 2268 - RNA, 19 nt, Artificial Sequence
  Synthetic
agguuaugguggcagucaa

SEQ ID NO: 2269 - RNA, 19 nt, Artificial Sequence
  Synthetic
ggggaagggagaugucuua

SEQ ID NO: 2270 - RNA, 19 nt, Artificial Sequence
  Synthetic
guuccugccccgugaaaua

SEQ ID NO: 2271 - RNA, 19 nt, Artificial Sequence
  Synthetic
augguuaugaggugggcaa

SEQ ID NO: 2272 - RNA, 19 nt, Artificial Sequence
  Synthetic
agaaccuguugcuggacaa

SEQ ID NO: 2273 - RNA, 19 nt, Artificial Sequence
  Synthetic
guaaguagguagagcaaaa

SEQ ID NO: 2274 - RNA, 19 nt, Artificial Sequence
  Synthetic
ggaagggaagagagggaua

SEQ ID NO: 2275 - RNA, 19 nt, Artificial Sequence
  Synthetic
ggaagaaauugaaggcuca

SEQ ID NO: 2276 - RNA, 19 nt, Artificial Sequence
  Synthetic
cgaagaagucccaggauuu

SEQ ID NO: 2277 - RNA, 19 nt, Artificial Sequence
  Synthetic
gggaagagagggauaagaa

SEQ ID NO: 2278 - RNA, 19 nt, Artificial Sequence
  Synthetic
ccgaagaagucccaggauu

SEQ ID NO: 2279 - RNA, 19 nt, Artificial Sequence
  Synthetic
ggaagagagggauaagaaa

SEQ ID NO: 2280 - RNA, 19 nt, Artificial Sequence
  Synthetic
agaagaauguguaugacaa

SEQ ID NO: 2281 - RNA, 19 nt, Artificial Sequence
  Synthetic
gguagaagaauguguauga

SEQ ID NO: 2282 - RNA, 19 nt, Artificial Sequence
  Synthetic
cagcacuuccagaggauaa

SEQ ID NO: 2283 - RNA, 19 nt, Artificial Sequence
  Synthetic
aaggauaugugcugaguuu

SEQ ID NO: 2284 - RNA, 19 nt, Artificial Sequence
  Synthetic
gaagagagggauaagaaaa

SEQ ID NO: 2285 - RNA, 19 nt, Artificial Sequence
  Synthetic
gacaagugauugaucuaaa

SEQ ID NO: 2286 - RNA, 19 nt, Artificial Sequence
  Synthetic
gcacuucacucaagagcuu

SEQ ID NO: 2287 - RNA, 19 nt, Artificial Sequence
  Synthetic
ccaacuuagccaagacaau

SEQ ID NO: 2288 - RNA, 19 nt, Artificial Sequence
  Synthetic
gaagaaaugcuacaaguau

SEQ ID NO: 2289 - RNA, 19 nt, Artificial Sequence
  Synthetic
gagcuuacuaugugucuaa

SEQ ID NO: 2290 - RNA, 19 nt, Artificial Sequence
  Synthetic
gguaugugaucgugucauu

SEQ ID NO: 2291 - RNA, 19 nt, Artificial Sequence
  Synthetic
agaaagagguccaugguug

SEQ ID NO: 2292 - RNA, 19 nt, Artificial Sequence
  Synthetic
cgaagaagucccaggauug

SEQ ID NO: 2293 - RNA, 19 nt, Artificial Sequence
  Synthetic
aggcagaauuggguauuua

SEQ ID NO: 2294 - RNA, 19 nt, Artificial Sequence
  Synthetic
ggauacaaccagcauuuua

SEQ ID NO: 2295 - RNA, 19 nt, Artificial Sequence
  Synthetic
gugucuaagucauguucua

SEQ ID NO: 2296 - RNA, 19 nt, Artificial Sequence
  Synthetic
gauuauauucaguccacua

SEQ ID NO: 2297 - RNA, 19 nt, Artificial Sequence
  Synthetic
gaagugcgccugagaggaa

SEQ ID NO: 2298 - RNA, 19 nt, Artificial Sequence
  Synthetic
ugaagaaaugcuacaagua

SEQ ID NO: 2299 - RNA, 19 nt, Artificial Sequence
  Synthetic
gcucauagacuuugggcug

SEQ ID NO: 2300 - RNA, 19 nt, Artificial Sequence
  Synthetic
aagccuuucugaagagcua

SEQ ID NO: 2301 - RNA, 19 nt, Artificial Sequence
  Synthetic
gaagggaagagagggauaa

SEQ ID NO: 2302 - RNA, 19 nt, Artificial Sequence
  Synthetic
ggagcuagcuuuuaaccuu

SEQ ID NO: 2303 - RNA, 19 nt, Artificial Sequence
  Synthetic
gggauuugggccagagaua

SEQ ID NO: 2304 - RNA, 19 nt, Artificial Sequence
  Synthetic
gguuggaguuggaugacaa

SEQ ID NO: 2305 - RNA, 19 nt, Artificial Sequence
  Synthetic
ggacaaucccuuucacaaa

SEQ ID NO: 2306 - RNA, 19 nt, Artificial Sequence
  Synthetic
ggaagaagcuggugcugga

SEQ ID NO: 2307 - RNA, 19 nt, Artificial Sequence
  Synthetic
gguccauacucuagguuuu

SEQ ID NO: 2308 - RNA, 19 nt, Artificial Sequence
  Synthetic
ggaagaagcgguuggaguu

SEQ ID NO: 2309 - RNA, 19 nt, Artificial Sequence
  Synthetic
cuacgugggaccugagaua

SEQ ID NO: 2310 - RNA, 19 nt, Artificial Sequence
  Synthetic
ccagggaagaggagggaga

SEQ ID NO: 2311 - RNA, 19 nt, Artificial Sequence
  Synthetic
ggaguacagcagugagcaa

SEQ ID NO: 2312 - RNA, 19 nt, Artificial Sequence
  Synthetic
ggaagaggagggagacaga

SEQ ID NO: 2313 - RNA, 19 nt, Artificial Sequence
  Synthetic
gagcaaaggagacaauauu

SEQ ID NO: 2314 - RNA, 19 nt, Artificial Sequence
  Synthetic
gaggcuaguucuugucuaa

SEQ ID NO: 2315 - RNA, 19 nt, Artificial Sequence
  Synthetic
aggaagaagcgguuggagu

SEQ ID NO: 2316 - RNA, 19 nt, Artificial Sequence
  Synthetic
acucaagacuguucuggaa

SEQ ID NO: 2317 - RNA, 19 nt, Artificial Sequence
  Synthetic
gagauaagaauccaaacua

SEQ ID NO: 2318 - RNA, 19 nt, Artificial Sequence
  Synthetic
ucgcugaccgugagaggaa

SEQ ID NO: 2319 - RNA, 19 nt, Artificial Sequence
  Synthetic
ccaugaguauguauguuua

SEQ ID NO: 2320 - RNA, 19 nt, Artificial Sequence
  Synthetic
aaacaaaccagcugccuuu

SEQ ID NO: 2321 - RNA, 19 nt, Artificial Sequence
  Synthetic
gagguaucccugugccaaa

SEQ ID NO: 2322 - RNA, 19 nt, Artificial Sequence
  Synthetic
ucucuguccucuugauuaa

SEQ ID NO: 2323 - RNA, 19 nt, Artificial Sequence
  Synthetic
agaagcuggugcuggagaa

SEQ ID NO: 2324 - RNA, 19 nt, Artificial Sequence
  Synthetic
ccaacaguggauugaguuu

SEQ ID NO: 2325 - RNA, 19 nt, Artificial Sequence
  Synthetic
aagaggagggagacagaga

SEQ ID NO: 2326 - RNA, 19 nt, Artificial Sequence
  Synthetic
uggagaaccuggaggacuc

SEQ ID NO: 2327 - RNA, 19 nt, Artificial Sequence
  Synthetic
ccagagauaagaauccaaa

SEQ ID NO: 2328 - RNA, 19 nt, Artificial Sequence
  Synthetic
cccuacaggcacugaguau

SEQ ID NO: 2329 - RNA, 19 nt, Artificial Sequence
  Synthetic
ugacaacacuuuuccauga

SEQ ID NO: 2330 - RNA, 19 nt, Artificial Sequence
  Synthetic
ggauuugggccagagauaa

SEQ ID NO: 2331 - RNA, 19 nt, Artificial Sequence
  Synthetic
uuggaugacaacuuagaua

SEQ ID NO: 2332 - RNA, 19 nt, Artificial Sequence
  Synthetic
caacuuagauaccgagcgu

SEQ ID NO: 2333 - RNA, 19 nt, Artificial Sequence
  Synthetic
ggaagaagagcaagaagaa

SEQ ID NO: 2334 - RNA, 19 nt, Artificial Sequence
  Synthetic
gugcagaggaagaaauuaa

SEQ ID NO: 2335 - RNA, 19 nt, Artificial Sequence
  Synthetic
gggcaaagacagcacaaua

SEQ ID NO: 2336 - RNA, 19 nt, Artificial Sequence
  Synthetic
ggaagaaauuaaugacaca

SEQ ID NO: 2337 - RNA, 19 nt, Artificial Sequence
  Synthetic
cggaaaaggagaagaggaa

SEQ ID NO: 2338 - RNA, 19 nt, Artificial Sequence
  Synthetic
agaugaaacugaaaggaau

SEQ ID NO: 2339 - RNA, 19 nt, Artificial Sequence
  Synthetic
ccugaagauuauuuggaaa

SEQ ID NO: 2340 - RNA, 19 nt, Artificial Sequence
  Synthetic
aagaagaagaagaggcauu

SEQ ID NO: 2341 - RNA, 19 nt, Artificial Sequence
  Synthetic
aggaagaagaggaagaaga

SEQ ID NO: 2342 - RNA, 19 nt, Artificial Sequence
  Synthetic
ccaagauacagauggcaaa

SEQ ID NO: 2343 - RNA, 19 nt, Artificial Sequence
  Synthetic
acaaaggaaaggugacuaa

SEQ ID NO: 2344 - RNA, 19 nt, Artificial Sequence
  Synthetic
guacauguccugugaauuu

SEQ ID NO: 2345 - RNA, 19 nt, Artificial Sequence
  Synthetic
agagaagacagaagaguau

SEQ ID NO: 2346 - RNA, 19 nt, Artificial Sequence
  Synthetic
gcagaaaauuacaaaggaa

SEQ ID NO: 2347 - RNA, 19 nt, Artificial Sequence
  Synthetic
aagaagagcaagaagaaga

SEQ ID NO: 2348 - RNA, 19 nt, Artificial Sequence
  Synthetic
ggcaaagacagcacaauaa

SEQ ID NO: 2349 - RNA, 19 nt, Artificial Sequence
  Synthetic
cugaagucauugagaauca

SEQ ID NO: 2350 - RNA, 19 nt, Artificial Sequence
  Synthetic
gaaaaggagaagaggaaga

SEQ ID NO: 2351 - RNA, 19 nt, Artificial Sequence
  Synthetic
gagaagaggaagaagagga

SEQ ID NO: 2352 - RNA, 19 nt, Artificial Sequence
  Synthetic
agaagaggaagaagagcaa

SEQ ID NO: 2353 - RNA, 19 nt, Artificial Sequence
  Synthetic
uagaagaaguaauggcuga

SEQ ID NO: 2354 - RNA, 19 nt, Artificial Sequence
  Synthetic
cauugagaaucauaggaaa

SEQ ID NO: 2355 - RNA, 19 nt, Artificial Sequence
  Synthetic
agacuaacuuccagaauua

SEQ ID NO: 2356 - RNA, 19 nt, Artificial Sequence
  Synthetic
cgugaaaugugaaugauua

SEQ ID NO: 2357 - RNA, 19 nt, Artificial Sequence
  Synthetic
guacaucgacucagaaaua

SEQ ID NO: 2358 - RNA, 19 nt, Artificial Sequence
  Synthetic
ggagcuuaauggagaaauu

SEQ ID NO: 2359 - RNA, 19 nt, Artificial Sequence
  Synthetic
uaacaugcauugugagaau

SEQ ID NO: 2360 - RNA, 19 nt, Artificial Sequence
  Synthetic
guauauaugugaacaguga

SEQ ID NO: 2361 - RNA, 19 nt, Artificial Sequence
  Synthetic
guaauaaacuugagcauuc

SEQ ID NO: 2362 - RNA, 19 nt, Artificial Sequence
  Synthetic
cagagagacuccagauuuu

SEQ ID NO: 2363 - RNA, 19 nt, Artificial Sequence
  Synthetic
cagcuucucugaugggaaa

SEQ ID NO: 2364 - RNA, 19 nt, Artificial Sequence
  Synthetic
ggaagaggcugcgggaaga

SEQ ID NO: 2365 - RNA, 19 nt, Artificial Sequence
  Synthetic
cagcaacauuacuggcauu

SEQ ID NO: 2366 - RNA, 19 nt, Artificial Sequence
  Synthetic
gcaaauuuguuucccuuaa

SEQ ID NO: 2367 - RNA, 19 nt, Artificial Sequence
  Synthetic
uaauuugagugcuuggaaa

SEQ ID NO: 2368 - RNA, 19 nt, Artificial Sequence
  Synthetic
uacaaaagauggagcuuaa

SEQ ID NO: 2369 - RNA, 19 nt, Artificial Sequence
  Synthetic
ccacgugaaaugugaauga

SEQ ID NO: 2370 - RNA, 19 nt, Artificial Sequence
  Synthetic
gaugaaagcugcugaacuc

SEQ ID NO: 2371 - RNA, 19 nt, Artificial Sequence
  Synthetic
cagacuaacuuccagaauu

SEQ ID NO: 2372 - RNA, 19 nt, Artificial Sequence
  Synthetic
ccagauuguuccagaguac

SEQ ID NO: 2373 - RNA, 19 nt, Artificial Sequence
  Synthetic
ggguacaucgacucagaaa

SEQ ID NO: 2374 - RNA, 19 nt, Artificial Sequence
  Synthetic
ucuagaagacacacacaua

SEQ ID NO: 2375 - RNA, 19 nt, Artificial Sequence
  Synthetic
ggaagugauccuuggggaa

SEQ ID NO: 2376 - RNA, 19 nt, Artificial Sequence
  Synthetic
gcaauauuaccuugacaga

SEQ ID NO: 2377 - RNA, 19 nt, Artificial Sequence
  Synthetic
gcaagguguuucccauuaa

SEQ ID NO: 2378 - RNA, 19 nt, Artificial Sequence
  Synthetic
ggaagaugaugcuuuguca

SEQ ID NO: 2379 - RNA, 19 nt, Artificial Sequence
  Synthetic
uuaaacacuaccaggacaa

SEQ ID NO: 2380 - RNA, 19 nt, Artificial Sequence
  Synthetic
ccaggaggacagugacauu

SEQ ID NO: 2381 - RNA, 19 nt, Artificial Sequence
  Synthetic
ccucagaaaccucauaauu

SEQ ID NO: 2382 - RNA, 19 nt, Artificial Sequence
  Synthetic
gcaaaucgcacaaugacau

SEQ ID NO: 2383 - RNA, 19 nt, Artificial Sequence
  Synthetic
gaauaaccugcgugucuaa

SEQ ID NO: 2384 - RNA, 19 nt, Artificial Sequence
  Synthetic
gguaccaaccagauaauga

SEQ ID NO: 2385 - RNA, 19 nt, Artificial Sequence
  Synthetic
guguagagauuaagccaaa

SEQ ID NO: 2386 - RNA, 19 nt, Artificial Sequence
  Synthetic
aguauaaacuggacggcaa

SEQ ID NO: 2387 - RNA, 19 nt, Artificial Sequence
  Synthetic
ggaagauggacgagaauga

SEQ ID NO: 2388 - RNA, 19 nt, Artificial Sequence
  Synthetic
gcugaaugauagagauauu

SEQ ID NO: 2389 - RNA, 19 nt, Artificial Sequence
  Synthetic
gaaacaacuuccuggacaa

SEQ ID NO: 2390 - RNA, 19 nt, Artificial Sequence
  Synthetic
cagaacaacuugaagauau

SEQ ID NO: 2391 - RNA, 19 nt, Artificial Sequence
  Synthetic
ggaagaagaccucggaaga

SEQ ID NO: 2392 - RNA, 19 nt, Artificial Sequence
  Synthetic
cauaguggacuuugggaaa

SEQ ID NO: 2393 - RNA, 19 nt, Artificial Sequence
  Synthetic
caggaaacaaacagagaau

SEQ ID NO: 2394 - RNA, 19 nt, Artificial Sequence
  Synthetic
gcacauuaguucuccacaa

SEQ ID NO: 2395 - RNA, 19 nt, Artificial Sequence
  Synthetic
uaacgaaggugcagcagua

SEQ ID NO: 2396 - RNA, 19 nt, Artificial Sequence
  Synthetic
cggaagagauauuucaaca

SEQ ID NO: 2397 - RNA, 19 nt, Artificial Sequence
  Synthetic
cgcaugagaugaagcauaa

SEQ ID NO: 2398 - RNA, 19 nt, Artificial Sequence
  Synthetic
gcacagaacaacuugaaga

SEQ ID NO: 2399 - RNA, 19 nt, Artificial Sequence
  Synthetic
gcaagaucgucaacuauua

SEQ ID NO: 2400 - RNA, 19 nt, Artificial Sequence
  Synthetic
acgcaugagaugaagcaua

SEQ ID NO: 2401 - RNA, 19 nt, Artificial Sequence
  Synthetic
gggaagacguucuggauag

SEQ ID NO: 2402 - RNA, 19 nt, Artificial Sequence
  Synthetic
ccaccagacuccuaacaua

SEQ ID NO: 2403 - RNA, 19 nt, Artificial Sequence
  Synthetic
gauucuguguguagagauu

SEQ ID NO: 2404 - RNA, 19 nt, Artificial Sequence
  Synthetic
gcgaaaagccuuauucuaa

SEQ ID NO: 2405 - RNA, 19 nt, Artificial Sequence
  Synthetic
gcuagguuguacagacuua

SEQ ID NO: 2406 - RNA, 19 nt, Artificial Sequence
  Synthetic
aagcgaagauugcacauua

SEQ ID NO: 2407 - RNA, 19 nt, Artificial Sequence
  Synthetic
ucagcuaccuuuagaguuu

SEQ ID NO: 2408 - RNA, 19 nt, Artificial Sequence
  Synthetic
ccaaauaggaagaagaccu

SEQ ID NO: 2409 - RNA, 19 nt, Artificial Sequence
  Synthetic
gugaaaccauggaauuaua

SEQ ID NO: 2410 - RNA, 19 nt, Artificial Sequence
  Synthetic
ccuccaaauaggaagaaga

SEQ ID NO: 2411 - RNA, 19 nt, Artificial Sequence
  Synthetic
cuugagacguguugcguuu

SEQ ID NO: 2412 - RNA, 19 nt, Artificial Sequence
  Synthetic
gguaccacggagagggcaa

SEQ ID NO: 2413 - RNA, 19 nt, Artificial Sequence
  Synthetic
gggaaguggaagcagauca

SEQ ID NO: 2414 - RNA, 19 nt, Artificial Sequence
  Synthetic
gacaaggaauguaggaagu

SEQ ID NO: 2415 - RNA, 19 nt, Artificial Sequence
  Synthetic
gaggauaagaggaaggcaa

SEQ ID NO: 2416 - RNA, 19 nt, Artificial Sequence
  Synthetic
aggauaagaggaaggcaaa

SEQ ID NO: 2417 - RNA, 19 nt, Artificial Sequence
  Synthetic
cgauaaaggacguggugca

SEQ ID NO: 2418 - RNA, 19 nt, Artificial Sequence
  Synthetic
agacaauggaggagaagca

SEQ ID NO: 2419 - RNA, 19 nt, Artificial Sequence
  Synthetic
uuuuagaggucaugcagaa

SEQ ID NO: 2420 - RNA, 19 nt, Artificial Sequence
  Synthetic
gggugaaccugguggugga

SEQ ID NO: 2421 - RNA, 19 nt, Artificial Sequence
  Synthetic
agaggaaggcaaagaaaau

SEQ ID NO: 2422 - RNA, 19 nt, Artificial Sequence
  Synthetic
cggaggugguggagaacgu

SEQ ID NO: 2423 - RNA, 19 nt, Artificial Sequence
  Synthetic
gaauaacgauaaaggacgu

SEQ ID NO: 2424 - RNA, 19 nt, Artificial Sequence
  Synthetic
ugguggagaacgugggcau

SEQ ID NO: 2425 - RNA, 19 nt, Artificial Sequence
  Synthetic
accuggugguggaggaaau

SEQ ID NO: 2426 - RNA, 19 nt, Artificial Sequence
  Synthetic
ccuugaugcuccagaucga

SEQ ID NO: 2427 - RNA, 19 nt, Artificial Sequence
  Synthetic
gugauaaagcagguggaau

SEQ ID NO: 2428 - RNA, 19 nt, Artificial Sequence
  Synthetic
aaauggaaaccaaagucaa

SEQ ID NO: 2429 - RNA, 19 nt, Artificial Sequence
  Synthetic
aggaagaccccuuucguaa

SEQ ID NO: 2430 - RNA, 19 nt, Artificial Sequence
  Synthetic
agucagagucacugucaga

SEQ ID NO: 2431 - RNA, 19 nt, Artificial Sequence
  Synthetic
ugugcuaaugacagacaaa

SEQ ID NO: 2432 - RNA, 19 nt, Artificial Sequence
  Synthetic
aaugacagacaaagccaaa

SEQ ID NO: 2433 - RNA, 19 nt, Artificial Sequence
  Synthetic
aggccguccugaagacaau

SEQ ID NO: 2434 - RNA, 19 nt, Artificial Sequence
  Synthetic
ccaggaggucauugaggau

SEQ ID NO: 2435 - RNA, 19 nt, Artificial Sequence
  Synthetic
aagaggaaggcaaagaaaa

SEQ ID NO: 2436 - RNA, 19 nt, Artificial Sequence
  Synthetic
acaugcuguuagaaggcaa

SEQ ID NO: 2437 - RNA, 19 nt, Artificial Sequence
  Synthetic
uggaaugcauggaugacca

SEQ ID NO: 2438 - RNA, 19 nt, Artificial Sequence
  Synthetic
ugaaagaggcuguggcaga

SEQ ID NO: 2439 - RNA, 19 nt, Artificial Sequence
  Synthetic
cgguccugaucgagagaaa

SEQ ID NO: 2440 - RNA, 19 nt, Artificial Sequence
  Synthetic
gccugugggcagugggaaa

SEQ ID NO: 2441 - RNA, 19 nt, Artificial Sequence
  Synthetic
gggaaaacaacaauagcaa

SEQ ID NO: 2442 - RNA, 19 nt, Artificial Sequence
  Synthetic
ucaugaaggugcugagcca

SEQ ID NO: 2443 - RNA, 19 nt, Artificial Sequence
  Synthetic
cugcaaaggaagacaguuc

SEQ ID NO: 2444 - RNA, 19 nt, Artificial Sequence
  Synthetic
ggaagagaaucgacccuca

SEQ ID NO: 2445 - RNA, 19 nt, Artificial Sequence
  Synthetic
acgccuggcugaagaggau

SEQ ID NO: 2446 - RNA, 19 nt, Artificial Sequence
  Synthetic
gcugaagaggauugcauca

SEQ ID NO: 2447 - RNA, 19 nt, Artificial Sequence
  Synthetic
cuggaguaucauaggaaca

SEQ ID NO: 2448 - RNA, 19 nt, Artificial Sequence
  Synthetic
cagcacuugcauagagaca

SEQ ID NO: 2449 - RNA, 19 nt, Artificial Sequence
  Synthetic
gaaacuuggggaagagaau

SEQ ID NO: 2450 - RNA, 19 nt, Artificial Sequence
  Synthetic
caaugucugcugugggcaa

SEQ ID NO: 2451 - RNA, 19 nt, Artificial Sequence
  Synthetic
agauacagauagugaagaa

SEQ ID NO: 2452 - RNA, 19 nt, Artificial Sequence
  Synthetic
gcauuguucuagagugaaa

SEQ ID NO: 2453 - RNA, 19 nt, Artificial Sequence
  Synthetic
cugcauuguucuagaguga

SEQ ID NO: 2454 - RNA, 19 nt, Artificial Sequence
  Synthetic
gaucagagaagcagauauu

SEQ ID NO: 2455 - RNA, 19 nt, Artificial Sequence
  Synthetic
acuaacagaugaagaagua

SEQ ID NO: 2456 - RNA, 19 nt, Artificial Sequence
  Synthetic
agaugaagaaguagaugaa

SEQ ID NO: 2457 - RNA, 19 nt, Artificial Sequence
  Synthetic
ugacuaugauggcuagaaa

SEQ ID NO: 2458 - RNA, 19 nt, Artificial Sequence
  Synthetic
aagcugaauugcaggauau

SEQ ID NO: 2459 - RNA, 19 nt, Artificial Sequence
  Synthetic
aagcagauauugauggaga

SEQ ID NO: 2460 - RNA, 19 nt, Artificial Sequence
  Synthetic
augacaaacuuaggagaaa

SEQ ID NO: 2461 - RNA, 19 nt, Artificial Sequence
  Synthetic
agaagaaauccgugaggca

SEQ ID NO: 2462 - RNA, 19 nt, Artificial Sequence
  Synthetic
caugacaaacuuaggagaa

SEQ ID NO: 2463 - RNA, 19 nt, Artificial Sequence
  Synthetic
gaagcugaauugcaggaua

SEQ ID NO: 2464 - RNA, 19 nt, Artificial Sequence
  Synthetic
ugaaagauacagauaguga

SEQ ID NO: 2465 - RNA, 19 nt, Artificial Sequence
  Synthetic
agauauugauggagacgga

SEQ ID NO: 2466 - RNA, 19 nt, Artificial Sequence
  Synthetic
ugaaaugaucagagaagca

SEQ ID NO: 2467 - RNA, 19 nt, Artificial Sequence
  Synthetic
caaauggguucuaguucaa

SEQ ID NO: 2468 - RNA, 19 nt, Artificial Sequence
  Synthetic
uaucagugcagcagaacua

SEQ ID NO: 2469 - RNA, 19 nt, Artificial Sequence
  Synthetic
cagucaggccuuuguauua

SEQ ID NO: 2470 - RNA, 19 nt, Artificial Sequence
  Synthetic
cagaugaagaaguagauga

SEQ ID NO: 2471 - RNA, 19 nt, Artificial Sequence
  Synthetic
ggucagaacccaacagaag

SEQ ID NO: 2472 - RNA, 19 nt, Artificial Sequence
  Synthetic
aagaaauccgugaggcauu

SEQ ID NO: 2473 - RNA, 19 nt, Artificial Sequence
  Synthetic
ucaaugaaguggaugcuga

SEQ ID NO: 2474 - RNA, 19 nt, Artificial Sequence
  Synthetic
caacaaaggaacuuggaac

SEQ ID NO: 2475 - RNA, 19 nt, Artificial Sequence
  Synthetic
aaguggaugcugaugguaa

SEQ ID NO: 2476 - RNA, 19 nt, Artificial Sequence
  Synthetic
cagauagugaagaagaaau

SEQ ID NO: 2477 - RNA, 19 nt, Artificial Sequence
  Synthetic
uagcaaaacugaaugucaa

SEQ ID NO: 2478 - RNA, 19 nt, Artificial Sequence
  Synthetic
ugacaaacuuaggagaaaa

SEQ ID NO: 2479 - RNA, 19 nt, Artificial Sequence
  Synthetic
ucaaauggguucuaguuca

SEQ ID NO: 2480 - RNA, 19 nt, Artificial Sequence
  Synthetic
ggacaugauuaaugaagua

SEQ ID NO: 2481 - RNA, 19 nt, Artificial Sequence
  Synthetic
ugacaaugauggcaagaaa

SEQ ID NO: 2482 - RNA, 19 nt, Artificial Sequence
  Synthetic
guacaaaugaugacagcaa

SEQ ID NO: 2483 - RNA, 19 nt, Artificial Sequence
  Synthetic
agaagaaauuagagaagca

SEQ ID NO: 2484 - RNA, 19 nt, Artificial Sequence
  Synthetic
ugacaaagauggugaugga

SEQ ID NO: 2485 - RNA, 19 nt, Artificial Sequence
  Synthetic
ccacagaagcagaguuaca

SEQ ID NO: 2486 - RNA, 19 nt, Artificial Sequence
  Synthetic
caacaaaggaauugggaac

SEQ ID NO: 2487 - RNA, 19 nt, Artificial Sequence
  Synthetic
agacacagacagugaagaa

SEQ ID NO: 2488 - RNA, 19 nt, Artificial Sequence
  Synthetic
gugaagaccuuguacagaa

SEQ ID NO: 2489 - RNA, 19 nt, Artificial Sequence
  Synthetic
agacagugaagaagaaauu

SEQ ID NO: 2490 - RNA, 19 nt, Artificial Sequence
  Synthetic
gaaguuaacagaugaagaa

SEQ ID NO: 2491 - RNA, 19 nt, Artificial Sequence
  Synthetic
aagcagaguuacaggacau

SEQ ID NO: 2492 - RNA, 19 nt, Artificial Sequence
  Synthetic
aaguagaugcugaugguaa

SEQ ID NO: 2493 - RNA, 19 nt, Artificial Sequence
  Synthetic
cuauauuagugcugcagaa

SEQ ID NO: 2494 - RNA, 19 nt, Artificial Sequence
  Synthetic
guuaacagaugaagaaguu

SEQ ID NO: 2495 - RNA, 19 nt, Artificial Sequence
  Synthetic
gugaagaagaaauuagaga

SEQ ID NO: 2496 - RNA, 19 nt, Artificial Sequence
  Synthetic
ggagagaaguuaacagaug

SEQ ID NO: 2497 - RNA, 19 nt, Artificial Sequence
  Synthetic
agaugaagaaguugaugaa

SEQ ID NO: 2498 - RNA, 19 nt, Artificial Sequence
  Synthetic
aguuacaggacaugauuaa

SEQ ID NO: 2499 - RNA, 19 nt, Artificial Sequence
  Synthetic
aguagaugcugaugguaau

SEQ ID NO: 2500 - RNA, 19 nt, Artificial Sequence
  Synthetic
caaagauggugauggaacu

SEQ ID NO: 2501 - RNA, 19 nt, Artificial Sequence
  Synthetic
gaucagggaagcagauauu

SEQ ID NO: 2502 - RNA, 19 nt, Artificial Sequence
  Synthetic
ugaaagacacagacaguga

SEQ ID NO: 2503 - RNA, 19 nt, Artificial Sequence
  Synthetic
ugacaaaccuuggagagaa

SEQ ID NO: 2504 - RNA, 19 nt, Artificial Sequence
  Synthetic
aagcagauauugaugguga

SEQ ID NO: 2505 - RNA, 19 nt, Artificial Sequence
  Synthetic
ugagggaacaucuggguua

SEQ ID NO: 2506 - RNA, 19 nt, Artificial Sequence
  Synthetic
gagagaaguuaacagauga

SEQ ID NO: 2507 - RNA, 19 nt, Artificial Sequence
  Synthetic
ggugauggaacuauaacaa

SEQ ID NO: 2508 - RNA, 19 nt, Artificial Sequence
  Synthetic
gaagaagaaauuagagaag

SEQ ID NO: 2509 - RNA, 19 nt, Artificial Sequence
  Synthetic
ugaagaaguugaugaaaug

SEQ ID NO: 2510 - RNA, 19 nt, Artificial Sequence
  Synthetic
ggucaauuaugaagaguuu

SEQ ID NO: 2511 - RNA, 19 nt, Artificial Sequence
  Synthetic
gagaaacgcaccugcaaua

SEQ ID NO: 2512 - RNA, 19 nt, Artificial Sequence
  Synthetic
ccgaugaggagguggauga

SEQ ID NO: 2513 - RNA, 19 nt, Artificial Sequence
  Synthetic
ugacugagaaucugauaaa

SEQ ID NO: 2514 - RNA, 19 nt, Artificial Sequence
  Synthetic
guacagaugaugacugcaa

SEQ ID NO: 2515 - RNA, 19 nt, Artificial Sequence
  Synthetic
gaugaugacugcaaaguga

SEQ ID NO: 2516 - RNA, 19 nt, Artificial Sequence
  Synthetic
gggagaagcugaccgauga

SEQ ID NO: 2517 - RNA, 19 nt, Artificial Sequence
  Synthetic
ccagaaagaugaaggacac

SEQ ID NO: 2518 - RNA, 19 nt, Artificial Sequence
  Synthetic
guaaauaccuggugcuaac

SEQ ID NO: 2519 - RNA, 19 nt, Artificial Sequence
  Synthetic
gccagaaagaugaaggaca

SEQ ID NO: 2520 - RNA, 19 nt, Artificial Sequence
  Synthetic
ucaaugagguggaugcaga

SEQ ID NO: 2521 - RNA, 19 nt, Artificial Sequence
  Synthetic
caagagaggcauuccagaa

SEQ ID NO: 2522 - RNA, 19 nt, Artificial Sequence
  Synthetic
aggcugacaucgauggaga

SEQ ID NO: 2523 - RNA, 19 nt, Artificial Sequence
  Synthetic
augaagaguuuguacagau

SEQ ID NO: 2524 - RNA, 19 nt, Artificial Sequence
  Synthetic
gagauggccaggucaauua

SEQ ID NO: 2525 - RNA, 19 nt, Artificial Sequence
  Synthetic
acacagacagugaggagga

SEQ ID NO: 2526 - RNA, 19 nt, Artificial Sequence
  Synthetic
gaaagaugaaggacacaga

SEQ ID NO: 2527 - RNA, 19 nt, Artificial Sequence
  Synthetic
augaggagguggaugagau

SEQ ID NO: 2528 - RNA, 19 nt, Artificial Sequence
  Synthetic
ggacacagacagugaggag

SEQ ID NO: 2529 - RNA, 19 nt, Artificial Sequence
  Synthetic
uagcaaacaccaauugauu

SEQ ID NO: 2530 - RNA, 19 nt, Artificial Sequence
  Synthetic
ggagcagauugcagaguuc

SEQ ID NO: 2531 - RNA, 19 nt, Artificial Sequence
  Synthetic
ugaaggacacagacaguga

SEQ ID NO: 2532 - RNA, 19 nt, Artificial Sequence
  Synthetic
cagacagugaggaggagau

SEQ ID NO: 2533 - RNA, 19 nt, Artificial Sequence
  Synthetic
gcgugaggcuguggacauu

SEQ ID NO: 2534 - RNA, 19 nt, Artificial Sequence
  Synthetic
gaugaaggacacagacagu

SEQ ID NO: 2535 - RNA, 19 nt, Artificial Sequence
  Synthetic
gaaacgcaccugcaauaaa

SEQ ID NO: 2536 - RNA, 19 nt, Artificial Sequence
  Synthetic
ccauugacuucccggaguu

SEQ ID NO: 2537 - RNA, 19 nt, Artificial Sequence
  Synthetic
cugagaaucugauaaagca

SEQ ID NO: 2538 - RNA, 19 nt, Artificial Sequence
  Synthetic
gcaauauuguguucaguuc

SEQ ID NO: 2539 - RNA, 19 nt, Artificial Sequence
  Synthetic
caugauggccagaaagaug

SEQ ID NO: 2540 - RNA, 19 nt, Artificial Sequence
  Synthetic
ggagaaggacccagagaaa

SEQ ID NO: 2541 - RNA, 19 nt, Artificial Sequence
  Synthetic
ggaagcaggcggaggacau

SEQ ID NO: 2542 - RNA, 19 nt, Artificial Sequence
  Synthetic
gcggaggacauuagagaca

SEQ ID NO: 2543 - RNA, 19 nt, Artificial Sequence
  Synthetic
gugagcagaucaagaagaa

SEQ ID NO: 2544 - RNA, 19 nt, Artificial Sequence
  Synthetic
gaagauaagaggacgcaga

SEQ ID NO: 2545 - RNA, 19 nt, Artificial Sequence
  Synthetic
cagcauggagaaugagauu

SEQ ID NO: 2546 - RNA, 19 nt, Artificial Sequence
  Synthetic
ggagauacagcucuagaua

SEQ ID NO: 2547 - RNA, 19 nt, Artificial Sequence
  Synthetic
ggugcuggaugcugugaaa

SEQ ID NO: 2548 - RNA, 19 nt, Artificial Sequence
  Synthetic
ugacgagaaugaugccaaa

SEQ ID NO: 2549 - RNA, 19 nt, Artificial Sequence
  Synthetic
cgcagaagcugguggccau

SEQ ID NO: 2550 - RNA, 19 nt, Artificial Sequence
  Synthetic
cccagaagcccuacagcaa

SEQ ID NO: 2551 - RNA, 19 nt, Artificial Sequence
  Synthetic
gagauacagcucuagauaa

SEQ ID NO: 2552 - RNA, 19 nt, Artificial Sequence
  Synthetic
agauacagcucuagauaag

SEQ ID NO: 2553 - RNA, 19 nt, Artificial Sequence
  Synthetic
gagcagaucaagaagaacu

SEQ ID NO: 2554 - RNA, 19 nt, Artificial Sequence
  Synthetic
ugcuggaugcugugaaaua

SEQ ID NO: 2555 - RNA, 19 nt, Artificial Sequence
  Synthetic
cggaggugauccuggcaga

SEQ ID NO: 2556 - RNA, 19 nt, Artificial Sequence
  Synthetic
ggcacuugauggagaagga

SEQ ID NO: 2557 - RNA, 19 nt, Artificial Sequence
  Synthetic
aggaaggcagcauggagaa

SEQ ID NO: 2558 - RNA, 19 nt, Artificial Sequence
  Synthetic
cggugagugagcagaucaa

SEQ ID NO: 2559 - RNA, 19 nt, Artificial Sequence
  Synthetic
gaugaagacuccaaaauca

SEQ ID NO: 2560 - RNA, 19 nt, Artificial Sequence
  Synthetic
acuacagccuggaugaaga

SEQ ID NO: 2561 - RNA, 19 nt, Artificial Sequence
  Synthetic
auacagcucuagauaagaa

SEQ ID NO: 2562 - RNA, 19 nt, Artificial Sequence
  Synthetic
uggagaaggacccagagaa

SEQ ID NO: 2563 - RNA, 19 nt, Artificial Sequence
  Synthetic
auggauugcaggagauaca

SEQ ID NO: 2564 - RNA, 19 nt, Artificial Sequence
  Synthetic
ucaagaagaacuuugccaa

SEQ ID NO: 2565 - RNA, 19 nt, Artificial Sequence
  Synthetic
aaggcagcauggagaauga

SEQ ID NO: 2566 - RNA, 19 nt, Artificial Sequence
  Synthetic
cugugaaauaccugcauga

SEQ ID NO: 2567 - RNA, 19 nt, Artificial Sequence
  Synthetic
ugaaauaccugcaugaccu

SEQ ID NO: 2568 - RNA, 19 nt, Artificial Sequence
  Synthetic
aggcggaggacauuagaga

SEQ ID NO: 2569 - RNA, 19 nt, Artificial Sequence
  Synthetic
ccuguggaacuccgggaua

SEQ ID NO: 2570 - RNA, 19 nt, Artificial Sequence
  Synthetic
cagcauagagaaugagaua

SEQ ID NO: 2571 - RNA, 19 nt, Artificial Sequence
  Synthetic
ggaaagcagcauagagaau

SEQ ID NO: 2572 - RNA, 19 nt, Artificial Sequence
  Synthetic
ugagaaagauuaagcauga

SEQ ID NO: 2573 - RNA, 19 nt, Artificial Sequence
  Synthetic
agauagccguccugagaaa

SEQ ID NO: 2574 - RNA, 19 nt, Artificial Sequence
  Synthetic
ccgaaaaucucuuguacua

SEQ ID NO: 2575 - RNA, 19 nt, Artificial Sequence
  Synthetic
uggagaaggacccgaauaa

SEQ ID NO: 2576 - RNA, 19 nt, Artificial Sequence
  Synthetic
ccagaaaccuuacagcaaa

SEQ ID NO: 2577 - RNA, 19 nt, Artificial Sequence
  Synthetic
gggcaaggaaagcagcaua

SEQ ID NO: 2578 - RNA, 19 nt, Artificial Sequence
  Synthetic
gguuuuagcugaagagaag

SEQ ID NO: 2579 - RNA, 19 nt, Artificial Sequence
  Synthetic
cgaagugguuuuagcugaa

SEQ ID NO: 2580 - RNA, 19 nt, Artificial Sequence
  Synthetic
ucgugagacauaugagaaa

SEQ ID NO: 2581 - RNA, 19 nt, Artificial Sequence
  Synthetic
agaaggcgcugaagggcaa

SEQ ID NO: 2582 - RNA, 19 nt, Artificial Sequence
  Synthetic
gcugaagacaucaagaaga

SEQ ID NO: 2583 - RNA, 19 nt, Artificial Sequence
  Synthetic
cccagaaaccuuacagcaa

SEQ ID NO: 2584 - RNA, 19 nt, Artificial Sequence
  Synthetic
gaugaggaguccaaaauaa

SEQ ID NO: 2585 - RNA, 19 nt, Artificial Sequence
  Synthetic
ggaaccugauggagaagga

SEQ ID NO: 2586 - RNA, 19 nt, Artificial Sequence
  Synthetic
uguacuaucuccacagaau

SEQ ID NO: 2587 - RNA, 19 nt, Artificial Sequence
  Synthetic
gagcaaauggagacaagca

SEQ ID NO: 2588 - RNA, 19 nt, Artificial Sequence
  Synthetic
ggcaaugggucgaaaggaa

SEQ ID NO: 2589 - RNA, 19 nt, Artificial Sequence
  Synthetic
ugaaauaccuacaugagaa

SEQ ID NO: 2590 - RNA, 19 nt, Artificial Sequence
  Synthetic
gcaauuuucaggagacaua

SEQ ID NO: 2591 - RNA, 19 nt, Artificial Sequence
  Synthetic
ggucaugguaccaguuaaa

SEQ ID NO: 2592 - RNA, 19 nt, Artificial Sequence
  Synthetic
gugagaaggccuugaguca

SEQ ID NO: 2593 - RNA, 19 nt, Artificial Sequence
  Synthetic
augaagaaacggagucuaa

SEQ ID NO: 2594 - RNA, 19 nt, Artificial Sequence
  Synthetic
gcguagaagccuuguugaa

SEQ ID NO: 2595 - RNA, 19 nt, Artificial Sequence
  Synthetic
agucuaagcuuuucgagaa

SEQ ID NO: 2596 - RNA, 19 nt, Artificial Sequence
  Synthetic
gggcuuagcaggagcaguu

SEQ ID NO: 2597 - RNA, 19 nt, Artificial Sequence
  Synthetic
agaagaucaaggagggcua

SEQ ID NO: 2598 - RNA, 19 nt, Artificial Sequence
  Synthetic
ggaggaaggcagagcaagu

SEQ ID NO: 2599 - RNA, 19 nt, Artificial Sequence
  Synthetic
cuucaacucuggaggcaau

SEQ ID NO: 2600 - RNA, 19 nt, Artificial Sequence
  Synthetic
acauauugcucuguggaua

SEQ ID NO: 2601 - RNA, 19 nt, Artificial Sequence
  Synthetic
gaaacggagucuaagcuuu

SEQ ID NO: 2602 - RNA, 19 nt, Artificial Sequence
  Synthetic
gcucugaagugcaucaaga

SEQ ID NO: 2603 - RNA, 19 nt, Artificial Sequence
  Synthetic
ggaagaaacagaccaccaa

SEQ ID NO: 2604 - RNA, 19 nt, Artificial Sequence
  Synthetic
ucagaaaccucuagaccca

SEQ ID NO: 2605 - RNA, 19 nt, Artificial Sequence
  Synthetic
cccagaaacccuacagcaa

SEQ ID NO: 2606 - RNA, 19 nt, Artificial Sequence
  Synthetic
gcccagagguggagaacag

SEQ ID NO: 2607 - RNA, 19 nt, Artificial Sequence
  Synthetic
ggucuugucggcagugaaa

SEQ ID NO: 2608 - RNA, 19 nt, Artificial Sequence
  Synthetic
gaaauaccuacaugagaau

SEQ ID NO: 2609 - RNA, 19 nt, Artificial Sequence
  Synthetic
gucgaaaggaagaagauga

SEQ ID NO: 2610 - RNA, 19 nt, Artificial Sequence
  Synthetic
ugaggaagcuacacaugaa

SEQ ID NO: 2611 - RNA, 19 nt, Artificial Sequence
  Synthetic
acagcagccuggagaauga

SEQ ID NO: 2612 - RNA, 19 nt, Artificial Sequence
  Synthetic
ggacagcagccuggagaau

SEQ ID NO: 2613 - RNA, 19 nt, Artificial Sequence
  Synthetic
ucuugucggcagugaaaua

SEQ ID NO: 2614 - RNA, 19 nt, Artificial Sequence
  Synthetic
gcaaagacugacugggaag

SEQ ID NO: 2615 - RNA, 19 nt, Artificial Sequence
  Synthetic
gccugaaacucaagccuca

SEQ ID NO: 2616 - RNA, 19 nt, Artificial Sequence
  Synthetic
aagcaaagacugacuggga

SEQ ID NO: 2617 - RNA, 19 nt, Artificial Sequence
  Synthetic
gggucgaaaggaagaagau

SEQ ID NO: 2618 - RNA, 19 nt, Artificial Sequence
  Synthetic
gagcagaacuggugaggau

SEQ ID NO: 2619 - RNA, 19 nt, Artificial Sequence
  Synthetic
gcucaaacuuucugcuauu

SEQ ID NO: 2620 - RNA, 19 nt, Artificial Sequence
  Synthetic
gggaacuguuugaagauau

SEQ ID NO: 2621 - RNA, 19 nt, Artificial Sequence
  Synthetic
gcaggaacuggcagggaua

SEQ ID NO: 2622 - RNA, 19 nt, Artificial Sequence
  Synthetic
cagcaaagcacugggaauu

SEQ ID NO: 2623 - RNA, 19 nt, Artificial Sequence
  Synthetic
cauaagcaauggagauuuu

SEQ ID NO: 2624 - RNA, 19 nt, Artificial Sequence
  Synthetic
ccaagaucaucaacacaaa

SEQ ID NO: 2625 - RNA, 19 nt, Artificial Sequence
  Synthetic
aauaagaugcugaccauua

SEQ ID NO: 2626 - RNA, 19 nt, Artificial Sequence
  Synthetic
gguguugguuggagcagaa

SEQ ID NO: 2627 - RNA, 19 nt, Artificial Sequence
  Synthetic
ugacagagcagcugauuga

SEQ ID NO: 2628 - RNA, 19 nt, Artificial Sequence
  Synthetic
guucaaugccaggaggaaa

SEQ ID NO: 2629 - RNA, 19 nt, Artificial Sequence
  Synthetic
ccagagggcuucccaguaa

SEQ ID NO: 2630 - RNA, 19 nt, Artificial Sequence
  Synthetic
gagcgauggugugaagaaa

SEQ ID NO: 2631 - RNA, 19 nt, Artificial Sequence
  Synthetic
ggaaacaagaagagcgaug

SEQ ID NO: 2632 - RNA, 19 nt, Artificial Sequence
  Synthetic
gcagcugauugaagccaua

SEQ ID NO: 2633 - RNA, 19 nt, Artificial Sequence
  Synthetic
ucaauaagaugcugaccau

SEQ ID NO: 2634 - RNA, 19 nt, Artificial Sequence
  Synthetic
gaagaaaacacucaacaaa

SEQ ID NO: 2635 - RNA, 19 nt, Artificial Sequence
  Synthetic
ggaccugaagccugagaau

SEQ ID NO: 2636 - RNA, 19 nt, Artificial Sequence
  Synthetic
ugauugaagccauaagcaa

SEQ ID NO: 2637 - RNA, 19 nt, Artificial Sequence
  Synthetic
cagugaagcuggcagacuu

SEQ ID NO: 2638 - RNA, 19 nt, Artificial Sequence
  Synthetic
ggaggaaacugaagggagc

SEQ ID NO: 2639 - RNA, 19 nt, Artificial Sequence
  Synthetic
cggaaacaggaaauuauaa

SEQ ID NO: 2640 - RNA, 19 nt, Artificial Sequence
  Synthetic
uagccaaauuucuguguau

SEQ ID NO: 2641 - RNA, 19 nt, Artificial Sequence
  Synthetic
gcggaaacaggaaauuaua

SEQ ID NO: 2642 - RNA, 19 nt, Artificial Sequence
  Synthetic
aucagaagcuggagcguga

SEQ ID NO: 2643 - RNA, 19 nt, Artificial Sequence
  Synthetic
gcaucucagaggagggaca

SEQ ID NO: 2644 - RNA, 19 nt, Artificial Sequence
  Synthetic
uaacuagacuucucagauu

SEQ ID NO: 2645 - RNA, 19 nt, Artificial Sequence
  Synthetic
caaaagaaagcaacguuua

SEQ ID NO: 2646 - RNA, 19 nt, Artificial Sequence
  Synthetic
ucuucgaggaauugggcaa

SEQ ID NO: 2647 - RNA, 19 nt, Artificial Sequence
  Synthetic
ggagcaaacgucuggcuau

SEQ ID NO: 2648 - RNA, 19 nt, Artificial Sequence
  Synthetic
uggaacaagccaagaguuu

SEQ ID NO: 2649 - RNA, 19 nt, Artificial Sequence
  Synthetic
gggacgaggaccagcacaa

SEQ ID NO: 2650 - RNA, 19 nt, Artificial Sequence
  Synthetic
gcacgucauuggagaggau

SEQ ID NO: 2651 - RNA, 19 nt, Artificial Sequence
  Synthetic
cgucacuccugaagccaaa

SEQ ID NO: 2652 - RNA, 19 nt, Artificial Sequence
  Synthetic
ucgagaaccugcuggccaa

SEQ ID NO: 2653 - RNA, 19 nt, Artificial Sequence
  Synthetic
ggaagcaggagaucauuaa

SEQ ID NO: 2654 - RNA, 19 nt, Artificial Sequence
  Synthetic
ccagaugugauuuguuaaa

SEQ ID NO: 2655 - RNA, 19 nt, Artificial Sequence
  Synthetic
gaccagaugugauuuguua

SEQ ID NO: 2656 - RNA, 19 nt, Artificial Sequence
  Synthetic
ggaacaagccaagaguuua

SEQ ID NO: 2657 - RNA, 19 nt, Artificial Sequence
  Synthetic
cggaagcaggagaucauua

SEQ ID NO: 2658 - RNA, 19 nt, Artificial Sequence
  Synthetic
caacaagaaagcagaugga

SEQ ID NO: 2659 - RNA, 19 nt, Artificial Sequence
  Synthetic
cgagagaguacuacagcga

SEQ ID NO: 2660 - RNA, 19 nt, Artificial Sequence
  Synthetic
acggugacuuugaggccua

SEQ ID NO: 2661 - RNA, 19 nt, Artificial Sequence
  Synthetic
ccaagaucaucaacaccaa

SEQ ID NO: 2662 - RNA, 19 nt, Artificial Sequence
  Synthetic
aagacauuguggcgagaga

SEQ ID NO: 2663 - RNA, 19 nt, Artificial Sequence
  Synthetic
ucaucgaggccgucaacaa

SEQ ID NO: 2664 - RNA, 19 nt, Artificial Sequence
  Synthetic
ucucagcagccaagaguuu

SEQ ID NO: 2665 - RNA, 19 nt, Artificial Sequence
  Synthetic
acauccugcucgugggcua

SEQ ID NO: 2666 - RNA, 19 nt, Artificial Sequence
  Synthetic
aguucaaugccaggagaaa

SEQ ID NO: 2667 - RNA, 19 nt, Artificial Sequence
  Synthetic
ccgacgaguaccagcucua

SEQ ID NO: 2668 - RNA, 19 nt, Artificial Sequence
  Synthetic
aaacaagaccagaugugau

SEQ ID NO: 2669 - RNA, 19 nt, Artificial Sequence
  Synthetic
gaacaagccaagaguuuac

SEQ ID NO: 2670 - RNA, 19 nt, Artificial Sequence
  Synthetic
ggacagaguugguguuugg

SEQ ID NO: 2671 - RNA, 19 nt, Artificial Sequence
  Synthetic
ccgaggagggcuuccacua

SEQ ID NO: 2672 - RNA, 19 nt, Artificial Sequence
  Synthetic
uagaggaugaagacgcuaa

SEQ ID NO: 2673 - RNA, 19 nt, Artificial Sequence
  Synthetic
aacaagaccagaugugauu

SEQ ID NO: 2674 - RNA, 19 nt, Artificial Sequence
  Synthetic
auuaaggagucuucugaca

SEQ ID NO: 2675 - RNA, 19 nt, Artificial Sequence
  Synthetic
gcaaaggggcugcagugaa

SEQ ID NO: 2676 - RNA, 19 nt, Artificial Sequence
  Synthetic
ccagacgaauagcaccaaa

SEQ ID NO: 2677 - RNA, 19 nt, Artificial Sequence
  Synthetic
ccaaagaccucaucaauaa

SEQ ID NO: 2678 - RNA, 19 nt, Artificial Sequence
  Synthetic
gcuaguagugugugagaaa

SEQ ID NO: 2679 - RNA, 19 nt, Artificial Sequence
  Synthetic
guaaagauccuuauggaaa

SEQ ID NO: 2680 - RNA, 19 nt, Artificial Sequence
  Synthetic
gaucaaggcuggagcuuau

SEQ ID NO: 2681 - RNA, 19 nt, Artificial Sequence
  Synthetic
gguaaaggacugauugaua

SEQ ID NO: 2682 - RNA, 19 nt, Artificial Sequence
  Synthetic
gguugaagcuuuucugaua

SEQ ID NO: 2683 - RNA, 19 nt, Artificial Sequence
  Synthetic
ggugagaagauguaugaaa

SEQ ID NO: 2684 - RNA, 19 nt, Artificial Sequence
  Synthetic
gaagaaaccagauggagua

SEQ ID NO: 2685 - RNA, 19 nt, Artificial Sequence
  Synthetic
gcacuaagaugugaggaaa

SEQ ID NO: 2686 - RNA, 19 nt, Artificial Sequence
  Synthetic
uaucaaagucacugaacaa

SEQ ID NO: 2687 - RNA, 19 nt, Artificial Sequence
  Synthetic
ugugaaagcacgaaagcaa

SEQ ID NO: 2688 - RNA, 19 nt, Artificial Sequence
  Synthetic
auggaaagccaguggauau

SEQ ID NO: 2689 - RNA, 19 nt, Artificial Sequence
  Synthetic
gugagaagauguaugaaaa

SEQ ID NO: 2690 - RNA, 19 nt, Artificial Sequence
  Synthetic
ccaagaguuuguugaagaa

SEQ ID NO: 2691 - RNA, 19 nt, Artificial Sequence
  Synthetic
auacaacaauugaggauga

SEQ ID NO: 2692 - RNA, 19 nt, Artificial Sequence
  Synthetic
guaaaggacugauugauau

SEQ ID NO: 2693 - RNA, 19 nt, Artificial Sequence
  Synthetic
gaaaauuccuacuggacaa

SEQ ID NO: 2694 - RNA, 19 nt, Artificial Sequence
  Synthetic
agacauaguggcaagagaa

SEQ ID NO: 2695 - RNA, 19 nt, Artificial Sequence
  Synthetic
gccaagaguuuguugaaga

SEQ ID NO: 2696 - RNA, 19 nt, Artificial Sequence
  Synthetic
acaagaauaugcugccaaa

SEQ ID NO: 2697 - RNA, 19 nt, Artificial Sequence
  Synthetic
gcauaucagaagagggcuu

SEQ ID NO: 2698 - RNA, 19 nt, Artificial Sequence
  Synthetic
cuccagaaguuuuacguaa

SEQ ID NO: 2699 - RNA, 19 nt, Artificial Sequence
  Synthetic
uaacuauguuggagguauu

SEQ ID NO: 2700 - RNA, 19 nt, Artificial Sequence
  Synthetic
caauuaaagugggaugaua

SEQ ID NO: 2701 - RNA, 19 nt, Artificial Sequence
  Synthetic
cacgaaagcaagagauuau

SEQ ID NO: 2702 - RNA, 19 nt, Artificial Sequence
  Synthetic
guaaaggagucaacugaga

SEQ ID NO: 2703 - RNA, 19 nt, Artificial Sequence
  Synthetic
caagggagcagcugugaaa

SEQ ID NO: 2704 - RNA, 19 nt, Artificial Sequence
  Synthetic
guagauggguugaagcuuu

SEQ ID NO: 2705 - RNA, 19 nt, Artificial Sequence
  Synthetic
guggaaugccaaagacaau

SEQ ID NO: 2706 - RNA, 19 nt, Artificial Sequence
  Synthetic
guuaauacacccaugcuaa

SEQ ID NO: 2707 - RNA, 19 nt, Artificial Sequence
  Synthetic
aggcaaagcuacagguuua

SEQ ID NO: 2708 - RNA, 19 nt, Artificial Sequence
  Synthetic
ggaaagaucccuauggaaa

SEQ ID NO: 2709 - RNA, 19 nt, Artificial Sequence
  Synthetic
ccaugaagccgaugagaaa

SEQ ID NO: 2710 - RNA, 19 nt, Artificial Sequence
  Synthetic
gagaauuggugcugcagaa

SEQ ID NO: 2711 - RNA, 19 nt, Artificial Sequence
  Synthetic
aaacaacgcugcagauuua

SEQ ID NO: 2712 - RNA, 19 nt, Artificial Sequence
  Synthetic
gcaugacaacauagaaaua

SEQ ID NO: 2713 - RNA, 19 nt, Artificial Sequence
  Synthetic
ccaaaagccuauugaacaa

SEQ ID NO: 2714 - RNA, 19 nt, Artificial Sequence
  Synthetic
gggaugaggaucagcacaa

SEQ ID NO: 2715 - RNA, 19 nt, Artificial Sequence
  Synthetic
gagaagaggcaaagcuaca

SEQ ID NO: 2716 - RNA, 19 nt, Artificial Sequence
  Synthetic
gacaaauggucuuagaauu

SEQ ID NO: 2717 - RNA, 19 nt, Artificial Sequence
  Synthetic
ccuguuuguuugagguuua

SEQ ID NO: 2718 - RNA, 19 nt, Artificial Sequence
  Synthetic
ggaaugaacuucuuuggaa

SEQ ID NO: 2719 - RNA, 19 nt, Artificial Sequence
  Synthetic
gaagagaucuauacccuaa

SEQ ID NO: 2720 - RNA, 19 nt, Artificial Sequence
  Synthetic
gggagaagaggcaaagcua

SEQ ID NO: 2721 - RNA, 19 nt, Artificial Sequence
  Synthetic
caggagaucauuaagauua

SEQ ID NO: 2722 - RNA, 19 nt, Artificial Sequence
  Synthetic
gaugagaaaccucguguua

SEQ ID NO: 2723 - RNA, 19 nt, Artificial Sequence
  Synthetic
gcagauagcaaagaagaua

SEQ ID NO: 2724 - RNA, 19 nt, Artificial Sequence
  Synthetic
ccagaaugggacacgguaa

SEQ ID NO: 2725 - RNA, 19 nt, Artificial Sequence
  Synthetic
gcacaaacaucuccacuuu

SEQ ID NO: 2726 - RNA, 19 nt, Artificial Sequence
  Synthetic
acaagaaacggaaggcauu

SEQ ID NO: 2727 - RNA, 19 nt, Artificial Sequence
  Synthetic
ggauggcggugucaagaaa

SEQ ID NO: 2728 - RNA, 19 nt, Artificial Sequence
  Synthetic
gaaagaucccuauggaaaa

SEQ ID NO: 2729 - RNA, 19 nt, Artificial Sequence
  Synthetic
ccagagaguacuacaguga

SEQ ID NO: 2730 - RNA, 19 nt, Artificial Sequence
  Synthetic
ccgucaagcuggcugauuu

SEQ ID NO: 2731 - RNA, 19 nt, Artificial Sequence
  Synthetic
aaugaaaccuugaacugaa

SEQ ID NO: 2732 - RNA, 19 nt, Artificial Sequence
  Synthetic
ccgcaggugugugaagaaa

SEQ ID NO: 2733 - RNA, 19 nt, Artificial Sequence
  Synthetic
ugagaaaccucguguuagu

SEQ ID NO: 2734 - RNA, 19 nt, Artificial Sequence
  Synthetic
gcuaaugucagcaucuaua

SEQ ID NO: 2735 - RNA, 19 nt, Artificial Sequence
  Synthetic
uuacagaacagcugauuga

SEQ ID NO: 2736 - RNA, 19 nt, Artificial Sequence
  Synthetic
acaaauggucuuagaauuc

SEQ ID NO: 2737 - RNA, 19 nt, Artificial Sequence
  Synthetic
aguuaaaggugcagauaua

SEQ ID NO: 2738 - RNA, 19 nt, Artificial Sequence
  Synthetic
ggugcaagccuuagagaaa

SEQ ID NO: 2739 - RNA, 19 nt, Artificial Sequence
  Synthetic
gcacauauuugaagugaau

SEQ ID NO: 2740 - RNA, 19 nt, Artificial Sequence
  Synthetic
aaucguaagaacugagaua

SEQ ID NO: 2741 - RNA, 19 nt, Artificial Sequence
  Synthetic
caucuuacuuuguggauuu

SEQ ID NO: 2742 - RNA, 19 nt, Artificial Sequence
  Synthetic
caugaaagcuauuccagaa

SEQ ID NO: 2743 - RNA, 19 nt, Artificial Sequence
  Synthetic
ccaaagaaacggcugacua

SEQ ID NO: 2744 - RNA, 19 nt, Artificial Sequence
  Synthetic
gguaagaaauugaaguauc

SEQ ID NO: 2745 - RNA, 19 nt, Artificial Sequence
  Synthetic
gggaugaaguaucucuaaa

SEQ ID NO: 2746 - RNA, 19 nt, Artificial Sequence
  Synthetic
ucuuagagguugugccuau

SEQ ID NO: 2747 - RNA, 19 nt, Artificial Sequence
  Synthetic
gcgaagaugcucaaaguca

SEQ ID NO: 2748 - RNA, 19 nt, Artificial Sequence
  Synthetic
cauguggucuguaggaaua

SEQ ID NO: 2749 - RNA, 19 nt, Artificial Sequence
  Synthetic
agagaaaguuaaaggugca

SEQ ID NO: 2750 - RNA, 19 nt, Artificial Sequence
  Synthetic
ugaagugaauaguagcaaa

SEQ ID NO: 2751 - RNA, 19 nt, Artificial Sequence
  Synthetic
ggauuguggaaaagggaua

SEQ ID NO: 2752 - RNA, 19 nt, Artificial Sequence
  Synthetic
ccugaaauucuuagagguu

SEQ ID NO: 2753 - RNA, 19 nt, Artificial Sequence
  Synthetic
gcaaguuaacacaacguaa

SEQ ID NO: 2754 - RNA, 19 nt, Artificial Sequence
  Synthetic
gaagugaauaguagcaaau

SEQ ID NO: 2755 - RNA, 19 nt, Artificial Sequence
  Synthetic
ggagaugcuuauagaugau

SEQ ID NO: 2756 - RNA, 19 nt, Artificial Sequence
  Synthetic
aggagaagcugaagacugu

SEQ ID NO: 2757 - RNA, 19 nt, Artificial Sequence
  Synthetic
gcagaugccguuaaacaaa

SEQ ID NO: 2758 - RNA, 19 nt, Artificial Sequence
  Synthetic
ggacuuggucagaaaauua

SEQ ID NO: 2759 - RNA, 19 nt, Artificial Sequence
  Synthetic
uugauaggauuguggaaaa

SEQ ID NO: 2760 - RNA, 19 nt, Artificial Sequence
  Synthetic
ggaggagaacuguuugaua

SEQ ID NO: 2761 - RNA, 19 nt, Artificial Sequence
  Synthetic
aaaagaagcuccaagaauu

SEQ ID NO: 2762 - RNA, 19 nt, Artificial Sequence
  Synthetic
gggcacaggcugagcugau

SEQ ID NO: 2763 - RNA, 19 nt, Artificial Sequence
  Synthetic
uauuccagaaggagagaaa

SEQ ID NO: 2764 - RNA, 19 nt, Artificial Sequence
  Synthetic
gauauuacagugagcgaga

SEQ ID NO: 2765 - RNA, 19 nt, Artificial Sequence
  Synthetic
uagcagaggagaagcugaa

SEQ ID NO: 2766 - RNA, 19 nt, Artificial Sequence
  Synthetic
caagaaagguguggaagca

SEQ ID NO: 2767 - RNA, 19 nt, Artificial Sequence
  Synthetic
ugacagaggaggagguuaa

SEQ ID NO: 2768 - RNA, 19 nt, Artificial Sequence
  Synthetic
caacgaaagugaagacaga

SEQ ID NO: 2769 - RNA, 19 nt, Artificial Sequence
  Synthetic
aguacaagcugcagaguga

SEQ ID NO: 2770 - RNA, 19 nt, Artificial Sequence
  Synthetic
gaaagaaggguuuggugaa

SEQ ID NO: 2771 - RNA, 19 nt, Artificial Sequence
  Synthetic
uguuugaccuccugagaaa

SEQ ID NO: 2772 - RNA, 19 nt, Artificial Sequence
  Synthetic
caggaaaccuacuggugaa

SEQ ID NO: 2773 - RNA, 19 nt, Artificial Sequence
  Synthetic
cagaauauccaguuagauu

SEQ ID NO: 2774 - RNA, 19 nt, Artificial Sequence
  Synthetic
gggacagacuggaauguau

SEQ ID NO: 2775 - RNA, 19 nt, Artificial Sequence
  Synthetic
caggaaaccuacuggugua

SEQ ID NO: 2776 - RNA, 19 nt, Artificial Sequence
  Synthetic
acaggaagaucaagaauga

SEQ ID NO: 2777 - RNA, 19 nt, Artificial Sequence
  Synthetic
ugaagauguuagacaagaa

SEQ ID NO: 2778 - RNA, 19 nt, Artificial Sequence
  Synthetic
cagcacagcccaagauuau

SEQ ID NO: 2779 - RNA, 19 nt, Artificial Sequence
  Synthetic
gaaaccuacuggugaaaga

SEQ ID NO: 2780 - RNA, 19 nt, Artificial Sequence
  Synthetic
gcccagagccuacuagaaa

SEQ ID NO: 2781 - RNA, 19 nt, Artificial Sequence
  Synthetic
gcaaccaguuugaggggaa

SEQ ID NO: 2782 - RNA, 19 nt, Artificial Sequence
  Synthetic
ugaucgagguccuggauga

SEQ ID NO: 2783 - RNA, 19 nt, Artificial Sequence
  Synthetic
ccaacaaggcuacgcagaa

SEQ ID NO: 2784 - RNA, 19 nt, Artificial Sequence
  Synthetic
gugcuuguucagugaguaa

SEQ ID NO: 2785 - RNA, 19 nt, Artificial Sequence
  Synthetic
cagaggaggagguuaagaa

SEQ ID NO: 2786 - RNA, 19 nt, Artificial Sequence
  Synthetic
ggccagagcuucaguggga

SEQ ID NO: 2787 - RNA, 19 nt, Artificial Sequence
  Synthetic
gggaacaucucacgagcuu

SEQ ID NO: 2788 - RNA, 19 nt, Artificial Sequence
  Synthetic
ccaguuagauucaacaaau

SEQ ID NO: 2789 - RNA, 19 nt, Artificial Sequence
  Synthetic
caccagagcucuugucuau

SEQ ID NO: 2790 - RNA, 19 nt, Artificial Sequence
  Synthetic
agaaugagcccgugguguu

SEQ ID NO: 2791 - RNA, 19 nt, Artificial Sequence
  Synthetic
gcgaggagcucaaggaccu

SEQ ID NO: 2792 - RNA, 19 nt, Artificial Sequence
  Synthetic
gcacaagcgaugagcaaac

SEQ ID NO: 2793 - RNA, 19 nt, Artificial Sequence
  Synthetic
caguguggcccgaagcuua

SEQ ID NO: 2794 - RNA, 19 nt, Artificial Sequence
  Synthetic
gcacacagcucacucguau

SEQ ID NO: 2795 - RNA, 19 nt, Artificial Sequence
  Synthetic
ccacggugauccuggugaa

SEQ ID NO: 2796 - RNA, 19 nt, Artificial Sequence
  Synthetic
agaaccaggcccagaauau

SEQ ID NO: 2797 - RNA, 19 nt, Artificial Sequence
  Synthetic
agaaagggcuugaaauuua

SEQ ID NO: 2798 - RNA, 19 nt, Artificial Sequence
  Synthetic
ggucaggaauucaagauua

SEQ ID NO: 2799 - RNA, 19 nt, Artificial Sequence
  Synthetic
ugaagaaacaccaaagaaa

SEQ ID NO: 2800 - RNA, 19 nt, Artificial Sequence
  Synthetic
gcaaagaggacgcccauaa

SEQ ID NO: 2801 - RNA, 19 nt, Artificial Sequence
  Synthetic
acagaaagggcuugaaauu

SEQ ID NO: 2802 - RNA, 19 nt, Artificial Sequence
  Synthetic
gagcacaguaguucagaaa

SEQ ID NO: 2803 - RNA, 19 nt, Artificial Sequence
  Synthetic
acaguaagaucaagaguca

SEQ ID NO: 2804 - RNA, 19 nt, Artificial Sequence
  Synthetic
ucguauaaauggcgucaua

SEQ ID NO: 2805 - RNA, 19 nt, Artificial Sequence
  Synthetic
gaaauaaacagacagcaaa

SEQ ID NO: 2806 - RNA, 19 nt, Artificial Sequence
  Synthetic
gcaaaggacagguagucua

SEQ ID NO: 2807 - RNA, 19 nt, Artificial Sequence
  Synthetic
caaugaaggugcuguccaa

SEQ ID NO: 2808 - RNA, 19 nt, Artificial Sequence
  Synthetic
guagaauuguagucaggaa

SEQ ID NO: 2809 - RNA, 19 nt, Artificial Sequence
  Synthetic
aaagcagguuucugagaua

SEQ ID NO: 2810 - RNA, 19 nt, Artificial Sequence
  Synthetic
auuuagagcuuccaggaua

SEQ ID NO: 2811 - RNA, 19 nt, Artificial Sequence
  Synthetic
caaagaaagcuguggaaag

SEQ ID NO: 2812 - RNA, 19 nt, Artificial Sequence
  Synthetic
gaaagacggcaccgggaaa

SEQ ID NO: 2813 - RNA, 19 nt, Artificial Sequence
  Synthetic
gagcagguguaccaggaaa

SEQ ID NO: 2814 - RNA, 19 nt, Artificial Sequence
  Synthetic
gaaguuugguugagguuca

SEQ ID NO: 2815 - RNA, 19 nt, Artificial Sequence
  Synthetic
aaaucaagauccuggugaa

SEQ ID NO: 2816 - RNA, 19 nt, Artificial Sequence
  Synthetic
gaucaaaggcaucgaguac

SEQ ID NO: 2817 - RNA, 19 nt, Artificial Sequence
  Synthetic
cagaaacuauuuagagcuu

SEQ ID NO: 2818 - RNA, 19 nt, Artificial Sequence
  Synthetic
ccgacauagcugaggacuu

SEQ ID NO: 2819 - RNA, 19 nt, Artificial Sequence
  Synthetic
ggucgagaacucagucaaa

SEQ ID NO: 2820 - RNA, 19 nt, Artificial Sequence
  Synthetic
gugaagaccaugauacgua

SEQ ID NO: 2821 - RNA, 19 nt, Artificial Sequence
  Synthetic
ugguggagguccuggauga

SEQ ID NO: 2822 - RNA, 19 nt, Artificial Sequence
  Synthetic
ccuccuggcuuuauguuua

SEQ ID NO: 2823 - RNA, 19 nt, Artificial Sequence
  Synthetic
ggaucguggugccggaaau

SEQ ID NO: 2824 - RNA, 19 nt, Artificial Sequence
  Synthetic
gaacuuaagagacaacuaa

SEQ ID NO: 2825 - RNA, 19 nt, Artificial Sequence
  Synthetic
gcaaaguaacguaagaguu

SEQ ID NO: 2826 - RNA, 19 nt, Artificial Sequence
  Synthetic
caagauggcuguaaacaca

SEQ ID NO: 2827 - RNA, 19 nt, Artificial Sequence
  Synthetic
ccaaauaucaggaacagaa

SEQ ID NO: 2828 - RNA, 19 nt, Artificial Sequence
  Synthetic
gaaauuuggugcugaugua

SEQ ID NO: 2829 - RNA, 19 nt, Artificial Sequence
  Synthetic
cagcaggucuaguggugaa

SEQ ID NO: 2830 - RNA, 19 nt, Artificial Sequence
  Synthetic
aaauguaaguggugaaguu

SEQ ID NO: 2831 - RNA, 19 nt, Artificial Sequence
  Synthetic
aagcagaugucuucagcua

SEQ ID NO: 2832 - RNA, 19 nt, Artificial Sequence
  Synthetic
ugacagaacuaaggaauau

SEQ ID NO: 2833 - RNA, 19 nt, Artificial Sequence
  Synthetic
ucacaguggagcugauaua

SEQ ID NO: 2834 - RNA, 19 nt, Artificial Sequence
  Synthetic
aagaugaccugcagaucaa

SEQ ID NO: 2835 - RNA, 19 nt, Artificial Sequence
  Synthetic
agccaaagcuggaacguaa

SEQ ID NO: 2836 - RNA, 19 nt, Artificial Sequence
  Synthetic
gaacuuaccuucagaacau

SEQ ID NO: 2837 - RNA, 19 nt, Artificial Sequence
  Synthetic
ucuucuggcuuuugaaaua

SEQ ID NO: 2838 - RNA, 19 nt, Artificial Sequence
  Synthetic
gugaaaagaugggaagaaa

SEQ ID NO: 2839 - RNA, 19 nt, Artificial Sequence
  Synthetic
cguagaucauccucagaaa

SEQ ID NO: 2840 - RNA, 19 nt, Artificial Sequence
  Synthetic
ccaaacgacugcugugaau

SEQ ID NO: 2841 - RNA, 19 nt, Artificial Sequence
  Synthetic
ggacagaugcaguucucaa

SEQ ID NO: 2842 - RNA, 19 nt, Artificial Sequence
  Synthetic
gagcaggaugugaguagaa

SEQ ID NO: 2843 - RNA, 19 nt, Artificial Sequence
  Synthetic
ggugaugggcagugggagu

SEQ ID NO: 2844 - RNA, 19 nt, Artificial Sequence
  Synthetic
ccugggagcuauuuacaaa

SEQ ID NO: 2845 - RNA, 19 nt, Artificial Sequence
  Synthetic
gaugcuggcuguucggaua

SEQ ID NO: 2846 - RNA, 19 nt, Artificial Sequence
  Synthetic
ccaaaugucagauacuaaa

SEQ ID NO: 2847 - RNA, 19 nt, Artificial Sequence
  Synthetic
gagcugagaucgcgccauu

SEQ ID NO: 2848 - RNA, 19 nt, Artificial Sequence
  Synthetic
ggagacaccucaaccagaa

SEQ ID NO: 2849 - RNA, 19 nt, Artificial Sequence
  Synthetic
ugaagaauccacuguguau

SEQ ID NO: 2850 - RNA, 19 nt, Artificial Sequence
  Synthetic
guaaagacacugaggagcu

SEQ ID NO: 2851 - RNA, 19 nt, Artificial Sequence
  Synthetic
gugcuuccuuuaagugaaa

SEQ ID NO: 2852 - RNA, 19 nt, Artificial Sequence
  Synthetic
ucuggaagcucuaagauga

SEQ ID NO: 2853 - RNA, 19 nt, Artificial Sequence
  Synthetic
gcagugugauggagagucu

SEQ ID NO: 2854 - RNA, 19 nt, Artificial Sequence
  Synthetic
gguaguuuauucaaagaga

SEQ ID NO: 2855 - RNA, 19 nt, Artificial Sequence
  Synthetic
ugggaguggccuuggguga

SEQ ID NO: 2856 - RNA, 19 nt, Artificial Sequence
  Synthetic
ccaggaaugacgugcugaa

SEQ ID NO: 2857 - RNA, 19 nt, Artificial Sequence
  Synthetic
gcaaccaucuucuggcuuu

SEQ ID NO: 2858 - RNA, 19 nt, Artificial Sequence
  Synthetic
caggaggugcagagggcuu

SEQ ID NO: 2859 - RNA, 19 nt, Artificial Sequence
  Synthetic
ggagagagagagcaugaga

SEQ ID NO: 2860 - RNA, 19 nt, Artificial Sequence
  Synthetic
agucuugugccuuaaauaa

SEQ ID NO: 2861 - RNA, 19 nt, Artificial Sequence
  Synthetic
gaaauaucgcccagaguuc

SEQ ID NO: 2862 - RNA, 19 nt, Artificial Sequence
  Synthetic
cagaguuccugaaguccua

SEQ ID NO: 2863 - RNA, 19 nt, Artificial Sequence
  Synthetic
auggacagagggagggauu

SEQ ID NO: 2864 - RNA, 19 nt, Artificial Sequence
  Synthetic
gagagcagaucaaugugua

SEQ ID NO: 2865 - RNA, 19 nt, Artificial Sequence
  Synthetic
ggacaaaacuggagaccau

SEQ ID NO: 2866 - RNA, 19 nt, Artificial Sequence
  Synthetic
cgauguaucaacagagaaa

SEQ ID NO: 2867 - RNA, 19 nt, Artificial Sequence
  Synthetic
caacagagaaacugggcaa

SEQ ID NO: 2868 - RNA, 19 nt, Artificial Sequence
  Synthetic
caaaggaacuaaagcguau

SEQ ID NO: 2869 - RNA, 19 nt, Artificial Sequence
  Synthetic
aaagagagccuuacggaaa

SEQ ID NO: 2870 - RNA, 19 nt, Artificial Sequence
  Synthetic
caguagagcagcugaggaa

SEQ ID NO: 2871 - RNA, 19 nt, Artificial Sequence
  Synthetic
cgaagaaaauggaaagaau

SEQ ID NO: 2872 - RNA, 19 nt, Artificial Sequence
  Synthetic
acagagagccaaagaggua

SEQ ID NO: 2873 - RNA, 19 nt, Artificial Sequence
  Synthetic
cauguuacccugagaauaa

SEQ ID NO: 2874 - RNA, 19 nt, Artificial Sequence
  Synthetic
acuaaagggugcaguacua

SEQ ID NO: 2875 - RNA, 19 nt, Artificial Sequence
  Synthetic
ggugaugaaauucgagaaa

SEQ ID NO: 2876 - RNA, 19 nt, Artificial Sequence
  Synthetic
uguuaaacuuggaggcuuu

SEQ ID NO: 2877 - RNA, 19 nt, Artificial Sequence
  Synthetic
cuuacagacugcagugaaa

SEQ ID NO: 2878 - RNA, 19 nt, Artificial Sequence
  Synthetic
gaugaagcauugaggguca

SEQ ID NO: 2879 - RNA, 19 nt, Artificial Sequence
  Synthetic
cagaugaaccaaugggaau

SEQ ID NO: 2880 - RNA, 19 nt, Artificial Sequence
  Synthetic
aagaagcaguacaaagaua

SEQ ID NO: 2881 - RNA, 19 nt, Artificial Sequence
  Synthetic
cauaauugguggcagggua

SEQ ID NO: 2882 - RNA, 19 nt, Artificial Sequence
  Synthetic
uagaguuauuggagacaua

SEQ ID NO: 2883 - RNA, 19 nt, Artificial Sequence
  Synthetic
gggcaugauucacaggcaa

SEQ ID NO: 2884 - RNA, 19 nt, Artificial Sequence
  Synthetic
augcagaucuugucacaua

SEQ ID NO: 2885 - RNA, 19 nt, Artificial Sequence
  Synthetic
ccaaggcaguggagccaua

SEQ ID NO: 2886 - RNA, 19 nt, Artificial Sequence
  Synthetic
ugaugaaauucgagaaauc

SEQ ID NO: 2887 - RNA, 19 nt, Artificial Sequence
  Synthetic
ccauuauaugagacagaua

SEQ ID NO: 2888 - RNA, 19 nt, Artificial Sequence
  Synthetic
guuaaguacagaagaucua

SEQ ID NO: 2889 - RNA, 19 nt, Artificial Sequence
  Synthetic
ugaaagugccaaagaccua

SEQ ID NO: 2890 - RNA, 19 nt, Artificial Sequence
  Synthetic
cacaucaaguccaggguua

SEQ ID NO: 2891 - RNA, 19 nt, Artificial Sequence
  Synthetic
gaaacuaaagggugcagua

SEQ ID NO: 2892 - RNA, 19 nt, Artificial Sequence
  Synthetic
cagaagaucuaaagcggga

SEQ ID NO: 2893 - RNA, 19 nt, Artificial Sequence
  Synthetic
cuguaaagaagcuggcauu

SEQ ID NO: 2894 - RNA, 19 nt, Artificial Sequence
  Synthetic
guagagcagcugaggaaau

SEQ ID NO: 2895 - RNA, 19 nt, Artificial Sequence
  Synthetic
ugugaaacauuaugccuua

SEQ ID NO: 2896 - RNA, 19 nt, Artificial Sequence
  Synthetic
accgagaggcugagacuaa

SEQ ID NO: 2897 - RNA, 19 nt, Artificial Sequence
  Synthetic
ccauggaccaccuggacaa

SEQ ID NO: 2898 - RNA, 19 nt, Artificial Sequence
  Synthetic
cagcaagugucccaaagaa

SEQ ID NO: 2899 - RNA, 19 nt, Artificial Sequence
  Synthetic
ccgaagacuugaacacuca

SEQ ID NO: 2900 - RNA, 19 nt, Artificial Sequence
  Synthetic
cccaagaaucugcagcuaa

SEQ ID NO: 2901 - RNA, 19 nt, Artificial Sequence
  Synthetic
gcugagacuaacccagaaa

SEQ ID NO: 2902 - RNA, 19 nt, Artificial Sequence
  Synthetic
agaaguggguucaggauuc

SEQ ID NO: 2903 - RNA, 19 nt, Artificial Sequence
  Synthetic
cagaaguggguucaggauu

SEQ ID NO: 2904 - RNA, 19 nt, Artificial Sequence
  Synthetic
cucgcgagcuauagaagaa

SEQ ID NO: 2905 - RNA, 19 nt, Artificial Sequence
  Synthetic
ccauuguggccaaggagau

SEQ ID NO: 2906 - RNA, 19 nt, Artificial Sequence
  Synthetic
ccaagaaucugcagcuaac

SEQ ID NO: 2907 - RNA, 19 nt, Artificial Sequence
  Synthetic
ccagucaccugcuguuaua

SEQ ID NO: 2908 - RNA, 19 nt, Artificial Sequence
  Synthetic
uuucaugguacuaguguuu

SEQ ID NO: 2909 - RNA, 19 nt, Artificial Sequence
  Synthetic
ucaagaccauuguggccaa

SEQ ID NO: 2910 - RNA, 19 nt, Artificial Sequence
  Synthetic
gaaacauccaauucucaaa

SEQ ID NO: 2911 - RNA, 19 nt, Artificial Sequence
  Synthetic
gcagaaguggguucaggau

SEQ ID NO: 2912 - RNA, 19 nt, Artificial Sequence
  Synthetic
agacuaacccagaaacauc

SEQ ID NO: 2913 - RNA, 19 nt, Artificial Sequence
  Synthetic
cagcagcaagugucccaaa

SEQ ID NO: 2914 - RNA, 19 nt, Artificial Sequence
  Synthetic
gugaaacauuaugccuuaa

SEQ ID NO: 2915 - RNA, 19 nt, Artificial Sequence
  Synthetic
gaagaaucaccagcagcaa

SEQ ID NO: 2916 - RNA, 19 nt, Artificial Sequence
  Synthetic
gcagcaagugucccaaaga

SEQ ID NO: 2917 - RNA, 19 nt, Artificial Sequence
  Synthetic
ggacaagcaaacccaaacu

SEQ ID NO: 2918 - RNA, 19 nt, Artificial Sequence
  Synthetic
agaaucugcagcuaacuua

SEQ ID NO: 2919 - RNA, 19 nt, Artificial Sequence
  Synthetic
cauccaauucucaaacuga

SEQ ID NO: 2920 - RNA, 19 nt, Artificial Sequence
  Synthetic
gcuguuauaacuucaccaa

SEQ ID NO: 2921 - RNA, 19 nt, Artificial Sequence
  Synthetic
gagacuaacccagaaacau

SEQ ID NO: 2922 - RNA, 19 nt, Artificial Sequence
  Synthetic
ggcugagacuaacccagaa

SEQ ID NO: 2923 - RNA, 19 nt, Artificial Sequence
  Synthetic
guuauaacuucaccaauag

SEQ ID NO: 2924 - RNA, 19 nt, Artificial Sequence
  Synthetic
acucucgccuccagcauga

SEQ ID NO: 2925 - RNA, 19 nt, Artificial Sequence
  Synthetic
gcaacuuugugguagauua

SEQ ID NO: 2926 - RNA, 19 nt, Artificial Sequence
  Synthetic
uaguuuagccaaaggauaa

SEQ ID NO: 2927 - RNA, 19 nt, Artificial Sequence
  Synthetic
guugcaaauacauggauaa

SEQ ID NO: 2928 - RNA, 19 nt, Artificial Sequence
  Synthetic
gcaaauacauggauaacac

SEQ ID NO: 2929 - RNA, 19 nt, Artificial Sequence
  Synthetic
uguugcaaauacauggaua

SEQ ID NO: 2930 - RNA, 19 nt, Artificial Sequence
  Synthetic
uguaugaccuggaacugaa

SEQ ID NO: 2931 - RNA, 19 nt, Artificial Sequence
  Synthetic
gguccaggaguacguguau

SEQ ID NO: 2932 - RNA, 19 nt, Artificial Sequence
  Synthetic
ggacacagcuggguucuga

SEQ ID NO: 2933 - RNA, 19 nt, Artificial Sequence
  Synthetic
gugguagauuacuaugaga

SEQ ID NO: 2934 - RNA, 19 nt, Artificial Sequence
  Synthetic
gaagcuuccucgcaacuuu

SEQ ID NO: 2935 - RNA, 19 nt, Artificial Sequence
  Synthetic
uuucucugcuguugcaaau

SEQ ID NO: 2936 - RNA, 19 nt, Artificial Sequence
  Synthetic
caacuuugugguagauuac

SEQ ID NO: 2937 - RNA, 19 nt, Artificial Sequence
  Synthetic
guucugaagcuucugaguu

SEQ ID NO: 2938 - RNA, 19 nt, Artificial Sequence
  Synthetic
guacguguaugaccuggaa

SEQ ID NO: 2939 - RNA, 19 nt, Artificial Sequence
  Synthetic
uucugaagcuucugaguuc

SEQ ID NO: 2940 - RNA, 19 nt, Artificial Sequence
  Synthetic
gcuggguucugaagcuucu

SEQ ID NO: 2941 - RNA, 19 nt, Artificial Sequence
  Synthetic
cugcgugacuguccugucu

SEQ ID NO: 2942 - RNA, 19 nt, Artificial Sequence
  Synthetic
cagcaccaaugggcucaga

SEQ ID NO: 2943 - RNA, 19 nt, Artificial Sequence
  Synthetic
ucucugcuguugcaaauac

SEQ ID NO: 2944 - RNA, 19 nt, Artificial Sequence
  Synthetic
ugugguagauuacuaugag

SEQ ID NO: 2945 - RNA, 19 nt, Artificial Sequence
  Synthetic
ucugcagccucaccucuga

SEQ ID NO: 2946 - RNA, 19 nt, Artificial Sequence
  Synthetic
uguccugucucuccucaug

SEQ ID NO: 2947 - RNA, 19 nt, Artificial Sequence
  Synthetic
ggacuccucuccgcaguuc

SEQ ID NO: 2948 - RNA, 19 nt, Artificial Sequence
  Synthetic
ggagaagugcagagaguaa

SEQ ID NO: 2949 - RNA, 19 nt, Artificial Sequence
  Synthetic
aggcacaggucaagagcua

SEQ ID NO: 2950 - RNA, 19 nt, Artificial Sequence
  Synthetic
cguggagacuggcgagaua

SEQ ID NO: 2951 - RNA, 19 nt, Artificial Sequence
  Synthetic
guucaguaugugagauaua

SEQ ID NO: 2952 - RNA, 19 nt, Artificial Sequence
  Synthetic
guuggaaacucaaguggaa

SEQ ID NO: 2953 - RNA, 19 nt, Artificial Sequence
  Synthetic
ggaaaugauggaaggacuu

SEQ ID NO: 2954 - RNA, 19 nt, Artificial Sequence
  Synthetic
gaggguagcaccaggcaua

SEQ ID NO: 2955 - RNA, 19 nt, Artificial Sequence
  Synthetic
ugcaggagauggaggacaa

SEQ ID NO: 2956 - RNA, 19 nt, Artificial Sequence
  Synthetic
aaggagaagugcagagagu

SEQ ID NO: 2957 - RNA, 19 nt, Artificial Sequence
  Synthetic
ucacugagcugccggacua

SEQ ID NO: 2958 - RNA, 19 nt, Artificial Sequence
  Synthetic
ggacaaucaguauguggua

SEQ ID NO: 2959 - RNA, 19 nt, Artificial Sequence
  Synthetic
cagaagaggaaaugaugga

SEQ ID NO: 2960 - RNA, 19 nt, Artificial Sequence
  Synthetic
gcaagaacgauauugaaca

SEQ ID NO: 2961 - RNA, 19 nt, Artificial Sequence
  Synthetic
gaacgauauugaacagcuu

SEQ ID NO: 2962 - RNA, 19 nt, Artificial Sequence
  Synthetic
cagaagcagcuguguauuu

SEQ ID NO: 2963 - RNA, 19 nt, Artificial Sequence
  Synthetic
acaacaagaucuccuuuaa

SEQ ID NO: 2964 - RNA, 19 nt, Artificial Sequence
  Synthetic
gggcaagaacgauauugaa

SEQ ID NO: 2965 - RNA, 19 nt, Artificial Sequence
  Synthetic
cauuggaucugcuggguca

SEQ ID NO: 2966 - RNA, 19 nt, Artificial Sequence
  Synthetic
caauauaaucccagcuagu

SEQ ID NO: 2967 - RNA, 19 nt, Artificial Sequence
  Synthetic
agaguaugauugugguuca

SEQ ID NO: 2968 - RNA, 19 nt, Artificial Sequence
  Synthetic
gcaucgucuucaaggccaa

SEQ ID NO: 2969 - RNA, 19 nt, Artificial Sequence
  Synthetic
gccagaagcagcuguguau

SEQ ID NO: 2970 - RNA, 19 nt, Artificial Sequence
  Synthetic
gcgagauaguugcccucaa

SEQ ID NO: 2971 - RNA, 19 nt, Artificial Sequence
  Synthetic
ggaaggaagauuugguuug

SEQ ID NO: 2972 - RNA, 19 nt, Artificial Sequence
  Synthetic
uggccuggcucgagucuuu

SEQ ID NO: 2973 - RNA, 19 nt, Artificial Sequence
  Synthetic
agauuaaggcucugcagga

SEQ ID NO: 2974 - RNA, 19 nt, Artificial Sequence
  Synthetic
aggaagauuugguuugguu

SEQ ID NO: 2975 - RNA, 19 nt, Artificial Sequence
  Synthetic
ggagaaguggaguuuggaa

SEQ ID NO: 2976 - RNA, 19 nt, Artificial Sequence
  Synthetic
gaguaugauugugguucaa

SEQ ID NO: 2977 - RNA, 19 nt, Artificial Sequence
  Synthetic
aggagauggaggacaauca

SEQ ID NO: 2978 - RNA, 19 nt, Artificial Sequence
  Synthetic
gcagaaagacagagaaaua

SEQ ID NO: 2979 - RNA, 19 nt, Artificial Sequence
  Synthetic
aauuaaaggugcaggcaua

SEQ ID NO: 2980 - RNA, 19 nt, Artificial Sequence
  Synthetic
agacagagaaauaaggaaa

SEQ ID NO: 2981 - RNA, 19 nt, Artificial Sequence
  Synthetic
gaagagaggaccagaguau

SEQ ID NO: 2982 - RNA, 19 nt, Artificial Sequence
  Synthetic
gcuugaagguguuagcaaa

SEQ ID NO: 2983 - RNA, 19 nt, Artificial Sequence
  Synthetic
gaagaaaugcauaagcaaa

SEQ ID NO: 2984 - RNA, 19 nt, Artificial Sequence
  Synthetic
gagccugaaaggagagaaa

SEQ ID NO: 2985 - RNA, 19 nt, Artificial Sequence
  Synthetic
ccaaagcaguggaaagauu

SEQ ID NO: 2986 - RNA, 19 nt, Artificial Sequence
  Synthetic
acauuuaggugucaagaaa

SEQ ID NO: 2987 - RNA, 19 nt, Artificial Sequence
  Synthetic
gcagauugcucuuauuaaa

SEQ ID NO: 2988 - RNA, 19 nt, Artificial Sequence
  Synthetic
gggaaagcauggacccuua

SEQ ID NO: 2989 - RNA, 19 nt, Artificial Sequence
  Synthetic
agauguagauguuggaaaa

SEQ ID NO: 2990 - RNA, 19 nt, Artificial Sequence
  Synthetic
gcagaagcccagcggcaaa

SEQ ID NO: 2991 - RNA, 19 nt, Artificial Sequence
  Synthetic
uuggagaaccugugugaaa

SEQ ID NO: 2992 - RNA, 19 nt, Artificial Sequence
  Synthetic
augcaaaguuagaugccaa

SEQ ID NO: 2993 - RNA, 19 nt, Artificial Sequence
  Synthetic
gaagaaagaagcaugauuu

SEQ ID NO: 2994 - RNA, 19 nt, Artificial Sequence
  Synthetic
gagauguagauguuggaaa

SEQ ID NO: 2995 - RNA, 19 nt, Artificial Sequence
  Synthetic
cauuugggcagaagggaaa

SEQ ID NO: 2996 - RNA, 19 nt, Artificial Sequence
  Synthetic
aaacaugggucaaggcuga

SEQ ID NO: 2997 - RNA, 19 nt, Artificial Sequence
  Synthetic
guauaaggguagacacaaa

SEQ ID NO: 2998 - RNA, 19 nt, Artificial Sequence
  Synthetic
ccauggaucugaagaaaua

SEQ ID NO: 2999 - RNA, 19 nt, Artificial Sequence
  Synthetic
guacagaucuccagaagua

SEQ ID NO: 3000 - RNA, 19 nt, Artificial Sequence
  Synthetic
acuagaaagugaagaggaa

SEQ ID NO: 3001 - RNA, 19 nt, Artificial Sequence
  Synthetic
ugccagagcuuuuggaaua

SEQ ID NO: 3002 - RNA, 19 nt, Artificial Sequence
  Synthetic
caaacgaauuucuggcaaa

SEQ ID NO: 3003 - RNA, 19 nt, Artificial Sequence
  Synthetic
ccuauggaguuguguauaa

SEQ ID NO: 3004 - RNA, 19 nt, Artificial Sequence
  Synthetic
acacaaaacuacaggucaa

SEQ ID NO: 3005 - RNA, 19 nt, Artificial Sequence
  Synthetic
cugaagaaauacuuggauu

SEQ ID NO: 3006 - RNA, 19 nt, Artificial Sequence
  Synthetic
ugaacuagcaacuaagaaa

SEQ ID NO: 3007 - RNA, 19 nt, Artificial Sequence
  Synthetic
gaucaacucuucaggauuu

SEQ ID NO: 3008 - RNA, 19 nt, Artificial Sequence
  Synthetic
caauuaaacuggcugauuu

SEQ ID NO: 3009 - RNA, 19 nt, Artificial Sequence
  Synthetic
cuucacuuguuaagaguua

SEQ ID NO: 3010 - RNA, 19 nt, Artificial Sequence
  Synthetic
cgggaaauuucucuauuaa

SEQ ID NO: 3011 - RNA, 19 nt, Artificial Sequence
  Synthetic
uggaauaccuaucagagua

SEQ ID NO: 3012 - RNA, 19 nt, Artificial Sequence
  Synthetic
caccauauuugcugaacua

SEQ ID NO: 3013 - RNA, 19 nt, Artificial Sequence
  Synthetic
gcaaaauggcacugaauca

SEQ ID NO: 3014 - RNA, 19 nt, Artificial Sequence
  Synthetic
aaaucagacuagaaaguga

SEQ ID NO: 3015 - RNA, 19 nt, Artificial Sequence
  Synthetic
aaucuaugauccagccaaa

SEQ ID NO: 3016 - RNA, 19 nt, Artificial Sequence
  Synthetic
ggccagaaguggaaucuuu

SEQ ID NO: 3017 - RNA, 19 nt, Artificial Sequence
  Synthetic
agauguagcuuucugacaa

SEQ ID NO: 3018 - RNA, 19 nt, Artificial Sequence
  Synthetic
ggauucagaaauugaucaa

SEQ ID NO: 3019 - RNA, 19 nt, Artificial Sequence
  Synthetic
ggaguuguguauaagggua

SEQ ID NO: 3020 - RNA, 19 nt, Artificial Sequence
  Synthetic
aauaauaagccgggaucua

SEQ ID NO: 3021 - RNA, 19 nt, Artificial Sequence
  Synthetic
aaagcuggcucuuggaaau

SEQ ID NO: 3022 - RNA, 19 nt, Artificial Sequence
  Synthetic
gauguagcuuucugacaaa

SEQ ID NO: 3023 - RNA, 19 nt, Artificial Sequence
  Synthetic
ucucuugauugaugacaaa

SEQ ID NO: 3024 - RNA, 19 nt, Artificial Sequence
  Synthetic
uggaaucuuuacaggacua

SEQ ID NO: 3025 - RNA, 19 nt, Artificial Sequence
  Synthetic
gacuaacuauggaagauua

SEQ ID NO: 3026 - RNA, 19 nt, Artificial Sequence
  Synthetic
augcaggauuccagguuau

SEQ ID NO: 3027 - RNA, 19 nt, Artificial Sequence
  Synthetic
agacagaagagaagggaaa

SEQ ID NO: 3028 - RNA, 19 nt, Artificial Sequence
  Synthetic
gagcauuccaggagagaaa

SEQ ID NO: 3029 - RNA, 19 nt, Artificial Sequence
  Synthetic
aggagaaagcagagauaaa

SEQ ID NO: 3030 - RNA, 19 nt, Artificial Sequence
  Synthetic
ggaaggaacaagaggagaa

SEQ ID NO: 3031 - RNA, 19 nt, Artificial Sequence
  Synthetic
gugaagaagcagaggaaga

SEQ ID NO: 3032 - RNA, 19 nt, Artificial Sequence
  Synthetic
cgaagaaguaagugaggaa

SEQ ID NO: 3033 - RNA, 19 nt, Artificial Sequence
  Synthetic
gaaacgacaucgagaagaa

SEQ ID NO: 3034 - RNA, 19 nt, Artificial Sequence
  Synthetic
gaagcaugcuagagugaaa

SEQ ID NO: 3035 - RNA, 19 nt, Artificial Sequence
  Synthetic
agaaaugagugaagaugaa

SEQ ID NO: 3036 - RNA, 19 nt, Artificial Sequence
  Synthetic
gagugaagaagcagaggaa

SEQ ID NO: 3037 - RNA, 19 nt, Artificial Sequence
  Synthetic
ggaagacagaggagaagaa

SEQ ID NO: 3038 - RNA, 19 nt, Artificial Sequence
  Synthetic
cagaaaagaugaaaagaga

SEQ ID NO: 3039 - RNA, 19 nt, Artificial Sequence
  Synthetic
gagugaagaugaagaacga

SEQ ID NO: 3040 - RNA, 19 nt, Artificial Sequence
  Synthetic
ggaagaaaugagugaagau

SEQ ID NO: 3041 - RNA, 19 nt, Artificial Sequence
  Synthetic
aaagcaugcuagagugaaa

SEQ ID NO: 3042 - RNA, 19 nt, Artificial Sequence
  Synthetic
agacagaggagaagaagau

SEQ ID NO: 3043 - RNA, 19 nt, Artificial Sequence
  Synthetic
gagaagacucuauggaaga

SEQ ID NO: 3044 - RNA, 19 nt, Artificial Sequence
  Synthetic
gugaagaaucagaggagga

SEQ ID NO: 3045 - RNA, 19 nt, Artificial Sequence
  Synthetic
gaacgaugagagaggacua

SEQ ID NO: 3046 - RNA, 19 nt, Artificial Sequence
  Synthetic
gcuucgaccucaugaacaa

SEQ ID NO: 3047 - RNA, 19 nt, Artificial Sequence
  Synthetic
aggaggaggaagaggaaga

SEQ ID NO: 3048 - RNA, 19 nt, Artificial Sequence
  Synthetic
gcaacauggacaagaucua

SEQ ID NO: 3049 - RNA, 19 nt, Artificial Sequence
  Synthetic
gaagaugaagaacgagaaa

SEQ ID NO: 3050 - RNA, 19 nt, Artificial Sequence
  Synthetic
ugggaaagacagaagagaa

SEQ ID NO: 3051 - RNA, 19 nt, Artificial Sequence
  Synthetic
cagaggaagaaguggguga

SEQ ID NO: 3052 - RNA, 19 nt, Artificial Sequence
  Synthetic
agaagaaguaagugaggaa

SEQ ID NO: 3053 - RNA, 19 nt, Artificial Sequence
  Synthetic
gaugaaaagaggaaagaaa

SEQ ID NO: 3054 - RNA, 19 nt, Artificial Sequence
  Synthetic
gagaagacucaauggaaga

SEQ ID NO: 3055 - RNA, 19 nt, Artificial Sequence
  Synthetic
gaaaagaugaaaagaggaa

SEQ ID NO: 3056 - RNA, 19 nt, Artificial Sequence
  Synthetic
cagcaaaugucuuggaaag

SEQ ID NO: 3057 - RNA, 19 nt, Artificial Sequence
  Synthetic
gggaaagacagaagagaag

SEQ ID NO: 3058 - RNA, 19 nt, Artificial Sequence
  Synthetic
guauagaagagaagacuca

SEQ ID NO: 3059 - RNA, 19 nt, Artificial Sequence
  Synthetic
gcagaagccagcacaguua

SEQ ID NO: 3060 - RNA, 19 nt, Artificial Sequence
  Synthetic
caaaugucucggaaagaaa

SEQ ID NO: 3061 - RNA, 19 nt, Artificial Sequence
  Synthetic
agaggagaaagcagagaua

SEQ ID NO: 3062 - RNA, 19 nt, Artificial Sequence
  Synthetic
aggcagaggcagaggguua

SEQ ID NO: 3063 - RNA, 19 nt, Artificial Sequence
  Synthetic
ggaaauagugacugauaaa

SEQ ID NO: 3064 - RNA, 19 nt, Artificial Sequence
  Synthetic
ggauaaagacacuggagaa

SEQ ID NO: 3065 - RNA, 19 nt, Artificial Sequence
  Synthetic
gcaauaucgucgaaaguua

SEQ ID NO: 3066 - RNA, 19 nt, Artificial Sequence
  Synthetic
gcaagauugucaugaguua

SEQ ID NO: 3067 - RNA, 19 nt, Artificial Sequence
  Synthetic
cagcaaagaugcacaacua

SEQ ID NO: 3068 - RNA, 19 nt, Artificial Sequence
  Synthetic
ggacaaaggugcauuuuau

SEQ ID NO: 3069 - RNA, 19 nt, Artificial Sequence
  Synthetic
agauaaagccaccaagaaa

SEQ ID NO: 3070 - RNA, 19 nt, Artificial Sequence
  Synthetic
cagaaagggcacugauuua

SEQ ID NO: 3071 - RNA, 19 nt, Artificial Sequence
  Synthetic
gcugauagcuuacgaggaa

SEQ ID NO: 3072 - RNA, 19 nt, Artificial Sequence
  Synthetic
gcauaggagccaaggagaa

SEQ ID NO: 3073 - RNA, 19 nt, Artificial Sequence
  Synthetic
cuacuagaagagagggaaa

SEQ ID NO: 3074 - RNA, 19 nt, Artificial Sequence
  Synthetic
gauaaagacacuggagaaa

SEQ ID NO: 3075 - RNA, 19 nt, Artificial Sequence
  Synthetic
ggagcaacauguagcuuua

SEQ ID NO: 3076 - RNA, 19 nt, Artificial Sequence
  Synthetic
gcaaagaugcacaacuaua

SEQ ID NO: 3077 - RNA, 19 nt, Artificial Sequence
  Synthetic
ugucaugaguuauggagua

SEQ ID NO: 3078 - RNA, 19 nt, Artificial Sequence
  Synthetic
caaaagagaaggugggauu

SEQ ID NO: 3079 - RNA, 19 nt, Artificial Sequence
  Synthetic
uggcagaggcagaggcaga

SEQ ID NO: 3080 - RNA, 19 nt, Artificial Sequence
  Synthetic
gaagaaagucggccguaua

SEQ ID NO: 3081 - RNA, 19 nt, Artificial Sequence
  Synthetic
gagaaaugguagccuuaaa

SEQ ID NO: 3082 - RNA, 19 nt, Artificial Sequence
  Synthetic
uaacgaagguggaaaauaa

SEQ ID NO: 3083 - RNA, 19 nt, Artificial Sequence
  Synthetic
ggaccauagauuugaauau

SEQ ID NO: 3084 - RNA, 19 nt, Artificial Sequence
  Synthetic
aggaaauagugacugauaa

SEQ ID NO: 3085 - RNA, 19 nt, Artificial Sequence
  Synthetic
caucggaauuauuggagaa

SEQ ID NO: 3086 - RNA, 19 nt, Artificial Sequence
  Synthetic
ccguauacuaacaagguaa

SEQ ID NO: 3087 - RNA, 19 nt, Artificial Sequence
  Synthetic
cgucgaaaguuaagagaag

SEQ ID NO: 3088 - RNA, 19 nt, Artificial Sequence
  Synthetic
cuagauuaucggacagaaa

SEQ ID NO: 3089 - RNA, 19 nt, Artificial Sequence
  Synthetic
gggcaugacugaugauguu

SEQ ID NO: 3090 - RNA, 19 nt, Artificial Sequence
  Synthetic
ugaggaagaucuagauuau

SEQ ID NO: 3091 - RNA, 19 nt, Artificial Sequence
  Synthetic
aggacaagaccgagccuaa

SEQ ID NO: 3092 - RNA, 19 nt, Artificial Sequence
  Synthetic
gcacaugaguagagaaaga

SEQ ID NO: 3093 - RNA, 19 nt, Artificial Sequence
  Synthetic
ggaaacaaaugguuagaaa

SEQ ID NO: 3094 - RNA, 19 nt, Artificial Sequence
  Synthetic
ggguauagauccucagaaa

SEQ ID NO: 3095 - RNA, 19 nt, Artificial Sequence
  Synthetic
gauaauagucggaaacaaa

SEQ ID NO: 3096 - RNA, 19 nt, Artificial Sequence
  Synthetic
cagcagaaaucgaagcaaa

SEQ ID NO: 3097 - RNA, 19 nt, Artificial Sequence
  Synthetic
agagaaagucaaagugaaa

SEQ ID NO: 3098 - RNA, 19 nt, Artificial Sequence
  Synthetic
cgauauugcugaaggaaaa

SEQ ID NO: 3099 - RNA, 19 nt, Artificial Sequence
  Synthetic
cugaagaauuggaggcauu

SEQ ID NO: 3100 - RNA, 19 nt, Artificial Sequence
  Synthetic
gggaaacgaagaaggguua

SEQ ID NO: 3101 - RNA, 19 nt, Artificial Sequence
  Synthetic
aguuagaagaagagguuaa

SEQ ID NO: 3102 - RNA, 19 nt, Artificial Sequence
  Synthetic
gauccagaaaugagaaaua

SEQ ID NO: 3103 - RNA, 19 nt, Artificial Sequence
  Synthetic
gaaaugagaugcagaauca

SEQ ID NO: 3104 - RNA, 19 nt, Artificial Sequence
  Synthetic
gaaugaaggagaagaguuu

SEQ ID NO: 3105 - RNA, 19 nt, Artificial Sequence
  Synthetic
gcacaagauuuugaagaaa

SEQ ID NO: 3106 - RNA, 19 nt, Artificial Sequence
  Synthetic
cagcaaauuugaagauaga

SEQ ID NO: 3107 - RNA, 19 nt, Artificial Sequence
  Synthetic
gggaggaauuugaaaguga

SEQ ID NO: 3108 - RNA, 19 nt, Artificial Sequence
  Synthetic
caacaauaugaacgagaaa

SEQ ID NO: 3109 - RNA, 19 nt, Artificial Sequence
  Synthetic
cugagaaugagaagaauaa

SEQ ID NO: 3110 - RNA, 19 nt, Artificial Sequence
  Synthetic
gaauacagauccugaaaga

SEQ ID NO: 3111 - RNA, 19 nt, Artificial Sequence
  Synthetic
gcauagaacaucagcaaga

SEQ ID NO: 3112 - RNA, 19 nt, Artificial Sequence
  Synthetic
ggacagggauucaggaguu

SEQ ID NO: 3113 - RNA, 19 nt, Artificial Sequence
  Synthetic
aggaauaggaacagcauau

SEQ ID NO: 3114 - RNA, 19 nt, Artificial Sequence
  Synthetic
ccauauaacuuguguaaac

SEQ ID NO: 3115 - RNA, 19 nt, Artificial Sequence
  Synthetic
gagaaggaauacaugcaaa

SEQ ID NO: 3116 - RNA, 19 nt, Artificial Sequence
  Synthetic
guuaguagcccaacagaua

SEQ ID NO: 3117 - RNA, 19 nt, Artificial Sequence
  Synthetic
ucagaaaggaauaggaaca

SEQ ID NO: 3118 - RNA, 19 nt, Artificial Sequence
  Synthetic
ggagacaauaaauggauua

SEQ ID NO: 3119 - RNA, 19 nt, Artificial Sequence
  Synthetic
uauuagaguuggugacaau

SEQ ID NO: 3120 - RNA, 19 nt, Artificial Sequence
  Synthetic
agucaggauuucuaagaua

SEQ ID NO: 3121 - RNA, 19 nt, Artificial Sequence
  Synthetic
acaagaaagagaagaucua

SEQ ID NO: 3122 - RNA, 19 nt, Artificial Sequence
  Synthetic
ccgaagagcucgaggcuuu

SEQ ID NO: 3123 - RNA, 19 nt, Artificial Sequence
  Synthetic
gcucaaacuuccagauuuu

SEQ ID NO: 3124 - RNA, 19 nt, Artificial Sequence
  Synthetic
gauaaauacgaacgagaaa

SEQ ID NO: 3125 - RNA, 19 nt, Artificial Sequence
  Synthetic
gcacaugaccugacauuua

SEQ ID NO: 3126 - RNA, 19 nt, Artificial Sequence
  Synthetic
ucgagaagacuuugaaaua

SEQ ID NO: 3127 - RNA, 19 nt, Artificial Sequence
  Synthetic
ccaaggaaauguagaauca

SEQ ID NO: 3128 - RNA, 19 nt, Artificial Sequence
  Synthetic
ccuaggaccuuaagagaau

SEQ ID NO: 3129 - RNA, 19 nt, Artificial Sequence
  Synthetic
gaagaauacugaacgaauu

SEQ ID NO: 3130 - RNA, 19 nt, Artificial Sequence
  Synthetic
aauccgagcuggagaagaa

SEQ ID NO: 3131 - RNA, 19 nt, Artificial Sequence
  Synthetic
cgaagcagccacugggaua

SEQ ID NO: 3132 - RNA, 19 nt, Artificial Sequence
  Synthetic
cuauguggguggugauuua

SEQ ID NO: 3133 - RNA, 19 nt, Artificial Sequence
  Synthetic
caaacaggcucgagcgaca

SEQ ID NO: 3134 - RNA, 19 nt, Artificial Sequence
  Synthetic
ggauaaacucacagcucaa

SEQ ID NO: 3135 - RNA, 19 nt, Artificial Sequence
  Synthetic
agaauggaauagaggauuu

SEQ ID NO: 3136 - RNA, 19 nt, Artificial Sequence
  Synthetic
gagacaaggaggaggagau

SEQ ID NO: 3137 - RNA, 19 nt, Artificial Sequence
  Synthetic
caauucaaaccgagauaaa

SEQ ID NO: 3138 - RNA, 19 nt, Artificial Sequence
  Synthetic
cggaagauauggcgagguu

SEQ ID NO: 3139 - RNA, 19 nt, Artificial Sequence
  Synthetic
uuacacagcuggugaaaga

SEQ ID NO: 3140 - RNA, 19 nt, Artificial Sequence
  Synthetic
cuucaaggucccagaggaa

SEQ ID NO: 3141 - RNA, 19 nt, Artificial Sequence
  Synthetic
augacgacgugcugagaaa

SEQ ID NO: 3142 - RNA, 19 nt, Artificial Sequence
  Synthetic
gcagaauggaauagaggau

SEQ ID NO: 3143 - RNA, 19 nt, Artificial Sequence
  Synthetic
uguacuuagucauggauua

SEQ ID NO: 3144 - RNA, 19 nt, Artificial Sequence
  Synthetic
cgagaagacuuugaaauaa

SEQ ID NO: 3145 - RNA, 19 nt, Artificial Sequence
  Synthetic
ugaucuacuucaagagcaa

SEQ ID NO: 3146 - RNA, 19 nt, Artificial Sequence
  Synthetic
gguugaaaucccaggccaa

SEQ ID NO: 3147 - RNA, 19 nt, Artificial Sequence
  Synthetic
cagaaaguucaaugagauu

SEQ ID NO: 3148 - RNA, 19 nt, Artificial Sequence
  Synthetic
ccuuagagcaccagcaaga

SEQ ID NO: 3149 - RNA, 19 nt, Artificial Sequence
  Synthetic
gucagaggcuugugauuaa

SEQ ID NO: 3150 - RNA, 19 nt, Artificial Sequence
  Synthetic
gcuaugagauccagagaac

SEQ ID NO: 3151 - RNA, 19 nt, Artificial Sequence
  Synthetic
ccauguauauucaggguga

SEQ ID NO: 3152 - RNA, 19 nt, Artificial Sequence
  Synthetic
aguaggaccugaagagaaa

SEQ ID NO: 3153 - RNA, 19 nt, Artificial Sequence
  Synthetic
caaagaaguuccagcacaa

SEQ ID NO: 3154 - RNA, 19 nt, Artificial Sequence
  Synthetic
uguuuaagauugaggacaa

SEQ ID NO: 3155 - RNA, 19 nt, Artificial Sequence
  Synthetic
aagaauaacagcagaagaa

SEQ ID NO: 3156 - RNA, 19 nt, Artificial Sequence
  Synthetic
ggacaauacucagggaauu

SEQ ID NO: 3157 - RNA, 19 nt, Artificial Sequence
  Synthetic
cagagaagacugaccauaa

SEQ ID NO: 3158 - RNA, 19 nt, Artificial Sequence
  Synthetic
ucaaacaccuccaggacaa

SEQ ID NO: 3159 - RNA, 19 nt, Artificial Sequence
  Synthetic
ccacauaaucacaggaaac

SEQ ID NO: 3160 - RNA, 19 nt, Artificial Sequence
  Synthetic
uauaagaauugcagcugaa

SEQ ID NO: 3161 - RNA, 19 nt, Artificial Sequence
  Synthetic
gcaaagaaguuccagcaca

SEQ ID NO: 3162 - RNA, 19 nt, Artificial Sequence
  Synthetic
cugcuaugcaacagauaaa

SEQ ID NO: 3163 - RNA, 19 nt, Artificial Sequence
  Synthetic
cagugaaacucaugaagca

SEQ ID NO: 3164 - RNA, 19 nt, Artificial Sequence
  Synthetic
aauccagcuucaagaauaa

SEQ ID NO: 3165 - RNA, 19 nt, Artificial Sequence
  Synthetic
ugaaguaggcaaagagaaa

SEQ ID NO: 3166 - RNA, 19 nt, Artificial Sequence
  Synthetic
ggaccaaggugaagauuga

SEQ ID NO: 3167 - RNA, 19 nt, Artificial Sequence
  Synthetic
gauaugagcuugugauaau

SEQ ID NO: 3168 - RNA, 19 nt, Artificial Sequence
  Synthetic
caccagaggucuugacaaa

SEQ ID NO: 3169 - RNA, 19 nt, Artificial Sequence
  Synthetic
caggaaagguguucacaaa

SEQ ID NO: 3170 - RNA, 19 nt, Artificial Sequence
  Synthetic
ccacaaaguuucuggaugu

SEQ ID NO: 3171 - RNA, 19 nt, Artificial Sequence
  Synthetic
caaucaaacuacagcaauu

SEQ ID NO: 3172 - RNA, 19 nt, Artificial Sequence
  Synthetic
cuagaaaguuagcaacaaa

SEQ ID NO: 3173 - RNA, 19 nt, Artificial Sequence
  Synthetic
gacccaagauagagguuua

SEQ ID NO: 3174 - RNA, 19 nt, Artificial Sequence
  Synthetic
gaagacagauaaugaagua

SEQ ID NO: 3175 - RNA, 19 nt, Artificial Sequence
  Synthetic
gagaaaaggacccaagaua

SEQ ID NO: 3176 - RNA, 19 nt, Artificial Sequence
  Synthetic
gguagcugcugaaaggaaa

SEQ ID NO: 3177 - RNA, 19 nt, Artificial Sequence
  Synthetic
gaccagagcaggauuaaua

SEQ ID NO: 3178 - RNA, 19 nt, Artificial Sequence
  Synthetic
uaacagaugugaugaggau

SEQ ID NO: 3179 - RNA, 19 nt, Artificial Sequence
  Synthetic
gauaaugucaugggaguua

SEQ ID NO: 3180 - RNA, 19 nt, Artificial Sequence
  Synthetic
cacaaaagcuucuguuaaa

SEQ ID NO: 3181 - RNA, 19 nt, Artificial Sequence
  Synthetic
gaagauugauaguccaaau

SEQ ID NO: 3182 - RNA, 19 nt, Artificial Sequence
  Synthetic
gaaauaagcgugucgagaa

SEQ ID NO: 3183 - RNA, 19 nt, Artificial Sequence
  Synthetic
acaacaaccugaagcacaa

SEQ ID NO: 3184 - RNA, 19 nt, Artificial Sequence
  Synthetic
ggaaccaccuggagagcau

SEQ ID NO: 3185 - RNA, 19 nt, Artificial Sequence
  Synthetic
ggacgaugccggaguguga

SEQ ID NO: 3186 - RNA, 19 nt, Artificial Sequence
  Synthetic
cgaacaucguggagcugaa

SEQ ID NO: 3187 - RNA, 19 nt, Artificial Sequence
  Synthetic
ggaagcagcccuacaacaa

SEQ ID NO: 3188 - RNA, 19 nt, Artificial Sequence
  Synthetic
ggacaagagggacaaggua

SEQ ID NO: 3189 - RNA, 19 nt, Artificial Sequence
  Synthetic
ggaagugugacaaggauuu

SEQ ID NO: 3190 - RNA, 19 nt, Artificial Sequence
  Synthetic
gugugaagacagcggauuu

SEQ ID NO: 3191 - RNA, 19 nt, Artificial Sequence
  Synthetic
ggauggacaaggagaagga

SEQ ID NO: 3192 - RNA, 19 nt, Artificial Sequence
  Synthetic
ggauuuggacacccagaaa

SEQ ID NO: 3193 - RNA, 19 nt, Artificial Sequence
  Synthetic
gacaagagggacaagguau

SEQ ID NO: 3194 - RNA, 19 nt, Artificial Sequence
  Synthetic
ucucggaggcucaggucaa

SEQ ID NO: 3195 - RNA, 19 nt, Artificial Sequence
  Synthetic
ggacuccagaugaggacaa

SEQ ID NO: 3196 - RNA, 19 nt, Artificial Sequence
  Synthetic
ugaaggaguuugagaagcu

SEQ ID NO: 3197 - RNA, 19 nt, Artificial Sequence
  Synthetic
gaucaguggugucugugaa

SEQ ID NO: 3198 - RNA, 19 nt, Artificial Sequence
  Synthetic
aggaggugguuguggggaa

SEQ ID NO: 3199 - RNA, 19 nt, Artificial Sequence
  Synthetic
agaaggugcggauggacaa

SEQ ID NO: 3200 - RNA, 19 nt, Artificial Sequence
  Synthetic
ggccagagcaagcgcugua

SEQ ID NO: 3201 - RNA, 19 nt, Artificial Sequence
  Synthetic
cgucugaaguguauucgua

SEQ ID NO: 3202 - RNA, 19 nt, Artificial Sequence
  Synthetic
ccaacuugcucaugaccga

SEQ ID NO: 3203 - RNA, 19 nt, Artificial Sequence
  Synthetic
acaaggagaaggauggcau

SEQ ID NO: 3204 - RNA, 19 nt, Artificial Sequence
  Synthetic
aucagcagcuugcgggaaa

SEQ ID NO: 3205 - RNA, 19 nt, Artificial Sequence
  Synthetic
gaugcugagcgaagcuaua

SEQ ID NO: 3206 - RNA, 19 nt, Artificial Sequence
  Synthetic
gcuauaggcucuuguugga

SEQ ID NO: 3207 - RNA, 19 nt, Artificial Sequence
  Synthetic
cugaacugcuguugggaac

SEQ ID NO: 3208 - RNA, 19 nt, Artificial Sequence
  Synthetic
aaauaagcgugucgagaag

SEQ ID NO: 3209 - RNA, 19 nt, Artificial Sequence
  Synthetic
aagaaggugcggauggaca

SEQ ID NO: 3210 - RNA, 19 nt, Artificial Sequence
  Synthetic
cugcacaggaacuucauua

SEQ ID NO: 3211 - RNA, 19 nt, Artificial Sequence
  Synthetic
aggcucaggucaagugcau

SEQ ID NO: 3212 - RNA, 19 nt, Artificial Sequence
  Synthetic
gagcaugacuuguggcaua

SEQ ID NO: 3213 - RNA, 19 nt, Artificial Sequence
  Synthetic
gauccaaccaagagaauua

SEQ ID NO: 3214 - RNA, 19 nt, Artificial Sequence
  Synthetic
gaauaugcauugaagcaaa

SEQ ID NO: 3215 - RNA, 19 nt, Artificial Sequence
  Synthetic
gauaaagacugggaagaua

SEQ ID NO: 3216 - RNA, 19 nt, Artificial Sequence
  Synthetic
aauugaaggcacaggaaua

SEQ ID NO: 3217 - RNA, 19 nt, Artificial Sequence
  Synthetic
ucauaaaguacauggagaa

SEQ ID NO: 3218 - RNA, 19 nt, Artificial Sequence
  Synthetic
gugcaaggcauuauacaaa

SEQ ID NO: 3219 - RNA, 19 nt, Artificial Sequence
  Synthetic
uaaaguacauggagaaaca

SEQ ID NO: 3220 - RNA, 19 nt, Artificial Sequence
  Synthetic
uggagaaacacaaggucaa

SEQ ID NO: 3221 - RNA, 19 nt, Artificial Sequence
  Synthetic
cagcaaauauccuaguaau

SEQ ID NO: 3222 - RNA, 19 nt, Artificial Sequence
  Synthetic
uggaaaagaugaaaaggaa

SEQ ID NO: 3223 - RNA, 19 nt, Artificial Sequence
  Synthetic
gagaauuccuuaaugaaga

SEQ ID NO: 3224 - RNA, 19 nt, Artificial Sequence
  Synthetic
gggagcggguggaggauuu

SEQ ID NO: 3225 - RNA, 19 nt, Artificial Sequence
  Synthetic
ugaagaugauccugaagaa

SEQ ID NO: 3226 - RNA, 19 nt, Artificial Sequence
  Synthetic
gaagcaaauugaaggcaca

SEQ ID NO: 3227 - RNA, 19 nt, Artificial Sequence
  Synthetic
uuagaaagaugccagaaua

SEQ ID NO: 3228 - RNA, 19 nt, Artificial Sequence
  Synthetic
auacaaaggccauugauau

SEQ ID NO: 3229 - RNA, 19 nt, Artificial Sequence
  Synthetic
uugccaagaucuaugguua

SEQ ID NO: 3230 - RNA, 19 nt, Artificial Sequence
  Synthetic
cauaaaguacauggagaaa

SEQ ID NO: 3231 - RNA, 19 nt, Artificial Sequence
  Synthetic
ugacauggguuuugccaga

SEQ ID NO: 3232 - RNA, 19 nt, Artificial Sequence
  Synthetic
ggaagauauuagaaagaug

SEQ ID NO: 3233 - RNA, 19 nt, Artificial Sequence
  Synthetic
uacaaaggccauugauaua

SEQ ID NO: 3234 - RNA, 19 nt, Artificial Sequence
  Synthetic
gcggaaagauggaaaagau

SEQ ID NO: 3235 - RNA, 19 nt, Artificial Sequence
  Synthetic
gagaauuaccucggagcaa

SEQ ID NO: 3236 - RNA, 19 nt, Artificial Sequence
  Synthetic
ugggaagauauuagaaaga

SEQ ID NO: 3237 - RNA, 19 nt, Artificial Sequence
  Synthetic
uagaaagaugccagaauau

SEQ ID NO: 3238 - RNA, 19 nt, Artificial Sequence
  Synthetic
aggaauaugcauugaagca

SEQ ID NO: 3239 - RNA, 19 nt, Artificial Sequence
  Synthetic
ggaaaagaugaaaaggaau

SEQ ID NO: 3240 - RNA, 19 nt, Artificial Sequence
  Synthetic
cugugaugcccucggauua

SEQ ID NO: 3241 - RNA, 19 nt, Artificial Sequence
  Synthetic
gaucggauauuuaguguca

SEQ ID NO: 3242 - RNA, 19 nt, Artificial Sequence
  Synthetic
gcaccaagaucucaagaaa

SEQ ID NO: 3243 - RNA, 19 nt, Artificial Sequence
  Synthetic
ggucauaguggguggauuu

SEQ ID NO: 3244 - RNA, 19 nt, Artificial Sequence
  Synthetic
gacaagagcgagagguaua

SEQ ID NO: 3245 - RNA, 19 nt, Artificial Sequence
  Synthetic
gggcuaaguuggugcuuuu

SEQ ID NO: 3246 - RNA, 19 nt, Artificial Sequence
  Synthetic
gaaacaaguugacgggaga

SEQ ID NO: 3247 - RNA, 19 nt, Artificial Sequence
  Synthetic
ggugagagauguuugaauu

SEQ ID NO: 3248 - RNA, 19 nt, Artificial Sequence
  Synthetic
gcugaagaggguugguaua

SEQ ID NO: 3249 - RNA, 19 nt, Artificial Sequence
  Synthetic
accaagaucucaagaaauu

SEQ ID NO: 3250 - RNA, 19 nt, Artificial Sequence
  Synthetic
gagaggugguggcgcuuaa

SEQ ID NO: 3251 - RNA, 19 nt, Artificial Sequence
  Synthetic
aguuagaaguuaggguuua

SEQ ID NO: 3252 - RNA, 19 nt, Artificial Sequence
  Synthetic
guacaaagccagaaacaag

SEQ ID NO: 3253 - RNA, 19 nt, Artificial Sequence
  Synthetic
ccauaggaguuagaaguua

SEQ ID NO: 3254 - RNA, 19 nt, Artificial Sequence
  Synthetic
ugagugagggcauggguaa

SEQ ID NO: 3255 - RNA, 19 nt, Artificial Sequence
  Synthetic
caauaguagaguuggcuuu

SEQ ID NO: 3256 - RNA, 19 nt, Artificial Sequence
  Synthetic
gcuagcagacuuuggacua

SEQ ID NO: 3257 - RNA, 19 nt, Artificial Sequence
  Synthetic
agacagggauugugcuuca

SEQ ID NO: 3258 - RNA, 19 nt, Artificial Sequence
  Synthetic
gaguuagaaguuaggguuu

SEQ ID NO: 3259 - RNA, 19 nt, Artificial Sequence
  Synthetic
ccaucaagcuagcagacuu

SEQ ID NO: 3260 - RNA, 19 nt, Artificial Sequence
  Synthetic
gagcuuaaccauccuaaua

SEQ ID NO: 3261 - RNA, 19 nt, Artificial Sequence
  Synthetic
gaagaggguugguauaaaa

SEQ ID NO: 3262 - RNA, 19 nt, Artificial Sequence
  Synthetic
ccucugaacuugccuuaaa

SEQ ID NO: 3263 - RNA, 19 nt, Artificial Sequence
  Synthetic
gguuauauccaauaguaga

SEQ ID NO: 3264 - RNA, 19 nt, Artificial Sequence
  Synthetic
ggugguggcgcuuaagaaa

SEQ ID NO: 3265 - RNA, 19 nt, Artificial Sequence
  Synthetic
guuucaaguuggccaaauu

SEQ ID NO: 3266 - RNA, 19 nt, Artificial Sequence
  Synthetic
guaccgagcuccugaaauc

SEQ ID NO: 3267 - RNA, 19 nt, Artificial Sequence
  Synthetic
cccuggagauucugagauu

SEQ ID NO: 3268 - RNA, 19 nt, Artificial Sequence
  Synthetic
cugaagaggguugguauaa

SEQ ID NO: 3269 - RNA, 19 nt, Artificial Sequence
  Synthetic
ucucuuaguuauugcugaa

SEQ ID NO: 3270 - RNA, 19 nt, Artificial Sequence
  Synthetic
gugagagauguuugaauuu

SEQ ID NO: 3271 - RNA, 19 nt, Artificial Sequence
  Synthetic
cuugagugcucuugcuauu

SEQ ID NO: 3272 - RNA, 19 nt, Artificial Sequence
  Synthetic
gagcaaagcacuaaggaau

SEQ ID NO: 3273 - RNA, 19 nt, Artificial Sequence
  Synthetic
uggaagagauugugcccaa

SEQ ID NO: 3274 - RNA, 19 nt, Artificial Sequence
  Synthetic
ggaagggacuggaagagau

SEQ ID NO: 3275 - RNA, 19 nt, Artificial Sequence
  Synthetic
gcacuaaggaauucagcau

SEQ ID NO: 3276 - RNA, 19 nt, Artificial Sequence
  Synthetic
uccagaagguagagaagau

SEQ ID NO: 3277 - RNA, 19 nt, Artificial Sequence
  Synthetic
cugaagaaguacauggacu

SEQ ID NO: 3278 - RNA, 19 nt, Artificial Sequence
  Synthetic
cagagauggugacucgaaa

SEQ ID NO: 3279 - RNA, 19 nt, Artificial Sequence
  Synthetic
aguaugugcugcagcgauu

SEQ ID NO: 3280 - RNA, 19 nt, Artificial Sequence
  Synthetic
acuaaggaauucagcauca

SEQ ID NO: 3281 - RNA, 19 nt, Artificial Sequence
  Synthetic
gcucuguggccauggauau

SEQ ID NO: 3282 - RNA, 19 nt, Artificial Sequence
  Synthetic
ccaucaagcuggcugacuu

SEQ ID NO: 3283 - RNA, 19 nt, Artificial Sequence
  Synthetic
gaagggacuggaagagauu

SEQ ID NO: 3284 - RNA, 19 nt, Artificial Sequence
  Synthetic
agguagagaagaucggaga

SEQ ID NO: 3285 - RNA, 19 nt, Artificial Sequence
  Synthetic
gagcauugguugcaucuuu

SEQ ID NO: 3286 - RNA, 19 nt, Artificial Sequence
  Synthetic
guggauaucuggagcauug

SEQ ID NO: 3287 - RNA, 19 nt, Artificial Sequence
  Synthetic
gggugguguacaaggccaa

SEQ ID NO: 3288 - RNA, 19 nt, Artificial Sequence
  Synthetic
ccuauggggugguguacaa

SEQ ID NO: 3289 - RNA, 19 nt, Artificial Sequence
  Synthetic
gaagaagaucagacuggau

SEQ ID NO: 3290 - RNA, 19 nt, Artificial Sequence
  Synthetic
cccaugagguggugacacu

SEQ ID NO: 3291 - RNA, 19 nt, Artificial Sequence
  Synthetic
ggccaagaacagggagaca

SEQ ID NO: 3292 - RNA, 19 nt, Artificial Sequence
  Synthetic
gggagaucucgcugcucaa

SEQ ID NO: 3293 - RNA, 19 nt, Artificial Sequence
  Synthetic
aagaagaucagacuggauu

SEQ ID NO: 3294 - RNA, 19 nt, Artificial Sequence
  Synthetic
cccagaaccugcucaucaa

SEQ ID NO: 3295 - RNA, 19 nt, Artificial Sequence
  Synthetic
gcagagauggugacucgaa

SEQ ID NO: 3296 - RNA, 19 nt, Artificial Sequence
  Synthetic
ggauauguuccagaaggua

SEQ ID NO: 3297 - RNA, 19 nt, Artificial Sequence
  Synthetic
gacuggauuuggagaugga

SEQ ID NO: 3298 - RNA, 19 nt, Artificial Sequence
  Synthetic
gagggcugagucuggguua

SEQ ID NO: 3299 - RNA, 19 nt, Artificial Sequence
  Synthetic
gcaaagcacuaaggaauuc

SEQ ID NO: 3300 - RNA, 19 nt, Artificial Sequence
  Synthetic
ugucaaggccacacucaga

SEQ ID NO: 3301 - RNA, 19 nt, Artificial Sequence
  Synthetic
gccaagagaggaugcaucu

SEQ ID NO: 3302 - RNA, 19 nt, Artificial Sequence
  Synthetic
ggugacaagugguggaaca

SEQ ID NO: 3303 - RNA, 19 nt, Artificial Sequence
  Synthetic
acauaaggaugaagguaau

SEQ ID NO: 3304 - RNA, 19 nt, Artificial Sequence
  Synthetic
gaacugaccgggagaucaa

SEQ ID NO: 3305 - RNA, 19 nt, Artificial Sequence
  Synthetic
uacauaaggaugaagguaa

SEQ ID NO: 3306 - RNA, 19 nt, Artificial Sequence
  Synthetic
ugacuggccucgagaugua

SEQ ID NO: 3307 - RNA, 19 nt, Artificial Sequence
  Synthetic
guaccgagcucccgaaguu

SEQ ID NO: 3308 - RNA, 19 nt, Artificial Sequence
  Synthetic
uggaaaugcugacuuuuaa

SEQ ID NO: 3309 - RNA, 19 nt, Artificial Sequence
  Synthetic
uggccagaaucuacagcua

SEQ ID NO: 3310 - RNA, 19 nt, Artificial Sequence
  Synthetic
ccuaugggacaguguacaa

SEQ ID NO: 3311 - RNA, 19 nt, Artificial Sequence
  Synthetic
cgggagaucaagagauguu

SEQ ID NO: 3312 - RNA, 19 nt, Artificial Sequence
  Synthetic
caauggaggaggaggugga

SEQ ID NO: 3313 - RNA, 19 nt, Artificial Sequence
  Synthetic
aagccgaccaguugggcaa

SEQ ID NO: 3314 - RNA, 19 nt, Artificial Sequence
  Synthetic
gaccaggaccuaaggacau

SEQ ID NO: 3315 - RNA, 19 nt, Artificial Sequence
  Synthetic
agaccaggaccuaaggaca

SEQ ID NO: 3316 - RNA, 19 nt, Artificial Sequence
  Synthetic
uggaggaggagguggagga

SEQ ID NO: 3317 - RNA, 19 nt, Artificial Sequence
  Synthetic
augcaacaccuguggacau

SEQ ID NO: 3318 - RNA, 19 nt, Artificial Sequence
  Synthetic
cuacauaaggaugaaggua

SEQ ID NO: 3319 - RNA, 19 nt, Artificial Sequence
  Synthetic
agguaacccugguguuuga

SEQ ID NO: 3320 - RNA, 19 nt, Artificial Sequence
  Synthetic
gaacagucaagcuggcuga

SEQ ID NO: 3321 - RNA, 19 nt, Artificial Sequence
  Synthetic
cagcacaguucgugaggug

SEQ ID NO: 3322 - RNA, 19 nt, Artificial Sequence
  Synthetic
gaccgggagaucaagguaa

SEQ ID NO: 3323 - RNA, 19 nt, Artificial Sequence
  Synthetic
gcauguagaccaggaccua

SEQ ID NO: 3324 - RNA, 19 nt, Artificial Sequence
  Synthetic
ucccauuucucuacacuaa

SEQ ID NO: 3325 - RNA, 19 nt, Artificial Sequence
  Synthetic
ugaggcgacuggaggcuuu

SEQ ID NO: 3326 - RNA, 19 nt, Artificial Sequence
  Synthetic
caagguaacccugguguuu

SEQ ID NO: 3327 - RNA, 19 nt, Artificial Sequence
  Synthetic
cagcacucuuaucuacaua

SEQ ID NO: 3328 - RNA, 19 nt, Artificial Sequence
  Synthetic
agauuacuuugcugccuua

SEQ ID NO: 3329 - RNA, 19 nt, Artificial Sequence
  Synthetic
ugaagguaauccggaguga

SEQ ID NO: 3330 - RNA, 19 nt, Artificial Sequence
  Synthetic
gaguguuggcuguaucuuu

SEQ ID NO: 3331 - RNA, 19 nt, Artificial Sequence
  Synthetic
guggacauguggaguguug

SEQ ID NO: 3332 - RNA, 19 nt, Artificial Sequence
  Synthetic
ucaaggagcugaagcacaa

SEQ ID NO: 3333 - RNA, 19 nt, Artificial Sequence
  Synthetic
cugaagaaguauuuugaca

SEQ ID NO: 3334 - RNA, 19 nt, Artificial Sequence
  Synthetic
gggcugggauucugucaua

SEQ ID NO: 3335 - RNA, 19 nt, Artificial Sequence
  Synthetic
gcgacaagaagcugacuuu

SEQ ID NO: 3336 - RNA, 19 nt, Artificial Sequence
  Synthetic
gcaaugaugucgaugacca

SEQ ID NO: 3337 - RNA, 19 nt, Artificial Sequence
  Synthetic
ccacaacaucccuggugaa

SEQ ID NO: 3338 - RNA, 19 nt, Artificial Sequence
  Synthetic
gagcugaagcacaagaaca

SEQ ID NO: 3339 - RNA, 19 nt, Artificial Sequence
  Synthetic
cccagaaccugcuaauaaa

SEQ ID NO: 3340 - RNA, 19 nt, Artificial Sequence
  Synthetic
ugaccaagcugccagacua

SEQ ID NO: 3341 - RNA, 19 nt, Artificial Sequence
  Synthetic
uggugaacgucgugcccaa

SEQ ID NO: 3342 - RNA, 19 nt, Artificial Sequence
  Synthetic
gggugaggcuggaugacga

SEQ ID NO: 3343 - RNA, 19 nt, Artificial Sequence
  Synthetic
gaugcagaaauacgagaaa

SEQ ID NO: 3344 - RNA, 19 nt, Artificial Sequence
  Synthetic
gaagaaguauuuugacagu

SEQ ID NO: 3345 - RNA, 19 nt, Artificial Sequence
  Synthetic
acgagaaacuggaaaagau

SEQ ID NO: 3346 - RNA, 19 nt, Artificial Sequence
  Synthetic
ugaccucgauccugagauu

SEQ ID NO: 3347 - RNA, 19 nt, Artificial Sequence
  Synthetic
ggaauggggagcugaaauu

SEQ ID NO: 3348 - RNA, 19 nt, Artificial Sequence
  Synthetic
caacaucccuggugaacgu

SEQ ID NO: 3349 - RNA, 19 nt, Artificial Sequence
  Synthetic
ccaagcugccagacuauaa

SEQ ID NO: 3350 - RNA, 19 nt, Artificial Sequence
  Synthetic
cgagaaacuggaaaagauu

SEQ ID NO: 3351 - RNA, 19 nt, Artificial Sequence
  Synthetic
aauacgagaaacuggaaaa

SEQ ID NO: 3352 - RNA, 19 nt, Artificial Sequence
  Synthetic
ccgggagacucaugagauc

SEQ ID NO: 3353 - RNA, 19 nt, Artificial Sequence
  Synthetic
cugagauuguaaagucauu

SEQ ID NO: 3354 - RNA, 19 nt, Artificial Sequence
  Synthetic
agcugaagcacaagaacau

SEQ ID NO: 3355 - RNA, 19 nt, Artificial Sequence
  Synthetic
agaaguauuuugacaguug

SEQ ID NO: 3356 - RNA, 19 nt, Artificial Sequence
  Synthetic
cagcugagguggucacacu

SEQ ID NO: 3357 - RNA, 19 nt, Artificial Sequence
  Synthetic
ccccagaaccugcuaauaa

SEQ ID NO: 3358 - RNA, 19 nt, Artificial Sequence
  Synthetic
gagcugaaauuggcugauu

SEQ ID NO: 3359 - RNA, 19 nt, Artificial Sequence
  Synthetic
gagcaguggcccucuauga

SEQ ID NO: 3360 - RNA, 19 nt, Artificial Sequence
  Synthetic
gaccaagcugccagacuau

SEQ ID NO: 3361 - RNA, 19 nt, Artificial Sequence
  Synthetic
cgggagaucugccuacuca

SEQ ID NO: 3362 - RNA, 19 nt, Artificial Sequence
  Synthetic
caaagaugcugcagauaaa

SEQ ID NO: 3363 - RNA, 19 nt, Artificial Sequence
  Synthetic
gcaagaacgccaaggacaa

SEQ ID NO: 3364 - RNA, 19 nt, Artificial Sequence
  Synthetic
gcucaaagaugcugcagau

SEQ ID NO: 3365 - RNA, 19 nt, Artificial Sequence
  Synthetic
ucaaagaugcugcagauaa

SEQ ID NO: 3366 - RNA, 19 nt, Artificial Sequence
  Synthetic
cgucauggcucaaggauuc

SEQ ID NO: 3367 - RNA, 19 nt, Artificial Sequence
  Synthetic
acaaugagaaccugaagaa

SEQ ID NO: 3368 - RNA, 19 nt, Artificial Sequence
  Synthetic
gcucaaggauucaaugcau

SEQ ID NO: 3369 - RNA, 19 nt, Artificial Sequence
  Synthetic
acaagaaccugaagcgcca

SEQ ID NO: 3370 - RNA, 19 nt, Artificial Sequence
  Synthetic
agaagaagaacuccaagaa

SEQ ID NO: 3371 - RNA, 19 nt, Artificial Sequence
  Synthetic
gcagauaaaugccgaccca

SEQ ID NO: 3372 - RNA, 19 nt, Artificial Sequence
  Synthetic
ggaagagaaucguggccgu

SEQ ID NO: 3373 - RNA, 19 nt, Artificial Sequence
  Synthetic
agauaaaugccgacccaca

SEQ ID NO: 3374 - RNA, 19 nt, Artificial Sequence
  Synthetic
ccaagaagaagaacuccaa

SEQ ID NO: 3375 - RNA, 19 nt, Artificial Sequence
  Synthetic
ccgugucggccaagaagaa

SEQ ID NO: 3376 - RNA, 19 nt, Artificial Sequence
  Synthetic
aagaagaagaacuccaaga

SEQ ID NO: 3377 - RNA, 19 nt, Artificial Sequence
  Synthetic
aaugagaaccugaagaagu

SEQ ID NO: 3378 - RNA, 19 nt, Artificial Sequence
  Synthetic
gcgccaaccuguccacauu

SEQ ID NO: 3379 - RNA, 19 nt, Artificial Sequence
  Synthetic
cggccguacagaacagcaa

SEQ ID NO: 3380 - RNA, 19 nt, Artificial Sequence
  Synthetic
agcaagaacgccaaggaca

SEQ ID NO: 3381 - RNA, 19 nt, Artificial Sequence
  Synthetic
cagaacagcaagaacgcca

SEQ ID NO: 3382 - RNA, 19 nt, Artificial Sequence
  Synthetic
agagcggccaggaggacaa

SEQ ID NO: 3383 - RNA, 19 nt, Artificial Sequence
  Synthetic
ccaacguggucuuccucua

SEQ ID NO: 3384 - RNA, 19 nt, Artificial Sequence
  Synthetic
ccucaugagcucaaagaug

SEQ ID NO: 3385 - RNA, 19 nt, Artificial Sequence
  Synthetic
cuacaugggcaacgagauc

SEQ ID NO: 3386 - RNA, 19 nt, Artificial Sequence
  Synthetic
ucuccgaccugaagaacga

SEQ ID NO: 3387 - RNA, 19 nt, Artificial Sequence
  Synthetic
gugcugccuuggaagagaa

SEQ ID NO: 3388 - RNA, 19 nt, Artificial Sequence
  Synthetic
ucaaggauucaaugcauuu

SEQ ID NO: 3389 - RNA, 19 nt, Artificial Sequence
  Synthetic
augagaaccugaagaaguc

SEQ ID NO: 3390 - RNA, 19 nt, Artificial Sequence
  Synthetic
gcagcuaccagaacaacau

SEQ ID NO: 3391 - RNA, 19 nt, Artificial Sequence
  Synthetic
cucaaggauucaaugcauu

SEQ ID NO: 3392 - RNA, 19 nt, Artificial Sequence
  Synthetic
ggaaccaagcacuggacua

SEQ ID NO: 3393 - RNA, 19 nt, Artificial Sequence
  Synthetic
cuaugaaccuggaccgcua

SEQ ID NO: 3394 - RNA, 19 nt, Artificial Sequence
  Synthetic
aagaagaaaggcagcaaga

SEQ ID NO: 3395 - RNA, 19 nt, Artificial Sequence
  Synthetic
gaagaaaggcagcaagaag

SEQ ID NO: 3396 - RNA, 19 nt, Artificial Sequence
  Synthetic
gccaagaagaagaaaggca

SEQ ID NO: 3397 - RNA, 19 nt, Artificial Sequence
  Synthetic
gaaccaagcacuggacuau

SEQ ID NO: 3398 - RNA, 19 nt, Artificial Sequence
  Synthetic
cugcaaaccugguguucgu

SEQ ID NO: 3399 - RNA, 19 nt, Artificial Sequence
  Synthetic
agaagaagaaaggcagcaa

SEQ ID NO: 3400 - RNA, 19 nt, Artificial Sequence
  Synthetic
uucaagaccucaagaacga

SEQ ID NO: 3401 - RNA, 19 nt, Artificial Sequence
  Synthetic
cugaucaaagggaauauua

SEQ ID NO: 3402 - RNA, 19 nt, Artificial Sequence
  Synthetic
gaucaaagggaauauuagu

SEQ ID NO: 3403 - RNA, 19 nt, Artificial Sequence
  Synthetic
agaagaaaggcagcaagaa

SEQ ID NO: 3404 - RNA, 19 nt, Artificial Sequence
  Synthetic
gggaaaggcacuccaaccu

SEQ ID NO: 3405 - RNA, 19 nt, Artificial Sequence
  Synthetic
caaaccugguguucgugua

SEQ ID NO: 3406 - RNA, 19 nt, Artificial Sequence
  Synthetic
accaagcacuggacuauga

SEQ ID NO: 3407 - RNA, 19 nt, Artificial Sequence
  Synthetic
ugucaugugucaccaucuu

SEQ ID NO: 3408 - RNA, 19 nt, Artificial Sequence
  Synthetic
caagaccaggccuucauua

SEQ ID NO: 3409 - RNA, 19 nt, Artificial Sequence
  Synthetic
ggcaagaccaggccuucau

SEQ ID NO: 3410 - RNA, 19 nt, Artificial Sequence
  Synthetic
gcugcuaucgccucaagga

SEQ ID NO: 3411 - RNA, 19 nt, Artificial Sequence
  Synthetic
ccaagcacuggacuaugaa

SEQ ID NO: 3412 - RNA, 19 nt, Artificial Sequence
  Synthetic
ucuuguugcuccugucaug

SEQ ID NO: 3413 - RNA, 19 nt, Artificial Sequence
  Synthetic
gagaucuccuacccacuca

SEQ ID NO: 3414 - RNA, 19 nt, Artificial Sequence
  Synthetic
ucucggcgcucaccuggaa

SEQ ID NO: 3415 - RNA, 19 nt, Artificial Sequence
  Synthetic
ugucugcaucuccaucuua

SEQ ID NO: 3416 - RNA, 19 nt, Artificial Sequence
  Synthetic
ccauuuccuugccuccuuu

SEQ ID NO: 3417 - RNA, 19 nt, Artificial Sequence
  Synthetic
gcaagaccaggccuucauu

SEQ ID NO: 3418 - RNA, 19 nt, Artificial Sequence
  Synthetic
ccaucugcccuucuuguug

SEQ ID NO: 3419 - RNA, 19 nt, Artificial Sequence
  Synthetic
gcacuccaaccucacucuu

SEQ ID NO: 3420 - RNA, 19 nt, Artificial Sequence
  Synthetic
ccacuugugucagcuugca

SEQ ID NO: 3421 - RNA, 19 nt, Artificial Sequence
  Synthetic
cuggaaaggugcaaagaaa

SEQ ID NO: 3422 - RNA, 19 nt, Artificial Sequence
  Synthetic
ggauaaaguuccagagccu

SEQ ID NO: 3423 - RNA, 19 nt, Artificial Sequence
  Synthetic
cugaaguguuugacauuua

SEQ ID NO: 3424 - RNA, 19 nt, Artificial Sequence
  Synthetic
acugaaaccauaaaggaua

SEQ ID NO: 3425 - RNA, 19 nt, Artificial Sequence
  Synthetic
ucacgaacagacagagaaa

SEQ ID NO: 3426 - RNA, 19 nt, Artificial Sequence
  Synthetic
gcaaagaccuacuucugaa

SEQ ID NO: 3427 - RNA, 19 nt, Artificial Sequence
  Synthetic
gaacagacagagaaaccaa

SEQ ID NO: 3428 - RNA, 19 nt, Artificial Sequence
  Synthetic
cugaaaccauaaaggauau

SEQ ID NO: 3429 - RNA, 19 nt, Artificial Sequence
  Synthetic
ccaauugagaaguuuguaa

SEQ ID NO: 3430 - RNA, 19 nt, Artificial Sequence
  Synthetic
gagaaguuuguaacagaua

SEQ ID NO: 3431 - RNA, 19 nt, Artificial Sequence
  Synthetic
ggagaagaagacuggccua

SEQ ID NO: 3432 - RNA, 19 nt, Artificial Sequence
  Synthetic
agacagagaaaccaaacua

SEQ ID NO: 3433 - RNA, 19 nt, Artificial Sequence
  Synthetic
uguaacagauaucgaugaa

SEQ ID NO: 3434 - RNA, 19 nt, Artificial Sequence
  Synthetic
uaucgaugaacuaggcaaa

SEQ ID NO: 3435 - RNA, 19 nt, Artificial Sequence
  Synthetic
gaccagcagcggacaaaua

SEQ ID NO: 3436 - RNA, 19 nt, Artificial Sequence
  Synthetic
acgaaugcguggcggagau

SEQ ID NO: 3437 - RNA, 19 nt, Artificial Sequence
  Synthetic
uaacagauaucgaugaacu

SEQ ID NO: 3438 - RNA, 19 nt, Artificial Sequence
  Synthetic
ggauaugauguuucagcuu

SEQ ID NO: 3439 - RNA, 19 nt, Artificial Sequence
  Synthetic
uugagaaguuuguaacaga

SEQ ID NO: 3440 - RNA, 19 nt, Artificial Sequence
  Synthetic
uggaaaggugcaaagaaaa

SEQ ID NO: 3441 - RNA, 19 nt, Artificial Sequence
  Synthetic
aaguucagauguugaucaa

SEQ ID NO: 3442 - RNA, 19 nt, Artificial Sequence
  Synthetic
ccagauggcucuaaccuca

SEQ ID NO: 3443 - RNA, 19 nt, Artificial Sequence
  Synthetic
aaauaaaacucgcugacuu

SEQ ID NO: 3444 - RNA, 19 nt, Artificial Sequence
  Synthetic
agacuggccuagagauguu

SEQ ID NO: 3445 - RNA, 19 nt, Artificial Sequence
  Synthetic
ucguggaaguucagauguu

SEQ ID NO: 3446 - RNA, 19 nt, Artificial Sequence
  Synthetic
gccuagagauguugcccuu

SEQ ID NO: 3447 - RNA, 19 nt, Artificial Sequence
  Synthetic
aagcugauccugcggagaa

SEQ ID NO: 3448 - RNA, 19 nt, Artificial Sequence
  Synthetic
gagcuguggaggauugcua

SEQ ID NO: 3449 - RNA, 19 nt, Artificial Sequence
  Synthetic
aguagugcaucgcgaucua

SEQ ID NO: 3450 - RNA, 19 nt, Artificial Sequence
  Synthetic
gacauuuaacccagccaaa

SEQ ID NO: 3451 - RNA, 19 nt, Artificial Sequence
  Synthetic
gggcaaagcguuaugagaa

SEQ ID NO: 3452 - RNA, 19 nt, Artificial Sequence
  Synthetic
gaacagaggccuuagaaca

SEQ ID NO: 3453 - RNA, 19 nt, Artificial Sequence
  Synthetic
ggacauagaucagaagcua

SEQ ID NO: 3454 - RNA, 19 nt, Artificial Sequence
  Synthetic
cuguauauuagcagaguua

SEQ ID NO: 3455 - RNA, 19 nt, Artificial Sequence
  Synthetic
ggaaacugaucuagagguu

SEQ ID NO: 3456 - RNA, 19 nt, Artificial Sequence
  Synthetic
gcuaagucauccaaauaua

SEQ ID NO: 3457 - RNA, 19 nt, Artificial Sequence
  Synthetic
guuuacaaggccagagaua

SEQ ID NO: 3458 - RNA, 19 nt, Artificial Sequence
  Synthetic
gauaagaauaccaaccaaa

SEQ ID NO: 3459 - RNA, 19 nt, Artificial Sequence
  Synthetic
acauagaucagaagcuaaa

SEQ ID NO: 3460 - RNA, 19 nt, Artificial Sequence
  Synthetic
gagcuaagucauccaaaua

SEQ ID NO: 3461 - RNA, 19 nt, Artificial Sequence
  Synthetic
aaacugaucuagagguuau

SEQ ID NO: 3462 - RNA, 19 nt, Artificial Sequence
  Synthetic
gggcacaccaacugaggaa

SEQ ID NO: 3463 - RNA, 19 nt, Artificial Sequence
  Synthetic
gauuagagucccaaaguga

SEQ ID NO: 3464 - RNA, 19 nt, Artificial Sequence
  Synthetic
aaucaaacuuggacauaga

SEQ ID NO: 3465 - RNA, 19 nt, Artificial Sequence
  Synthetic
caauagagcuuauacacau

SEQ ID NO: 3466 - RNA, 19 nt, Artificial Sequence
  Synthetic
gaugacucuucaaggauua

SEQ ID NO: 3467 - RNA, 19 nt, Artificial Sequence
  Synthetic
ccgccuuaagagagauaaa

SEQ ID NO: 3468 - RNA, 19 nt, Artificial Sequence
  Synthetic
ggagcuaagucauccaaau

SEQ ID NO: 3469 - RNA, 19 nt, Artificial Sequence
  Synthetic
ggaaaagaacagaggccuu

SEQ ID NO: 3470 - RNA, 19 nt, Artificial Sequence
  Synthetic
caaccaaauugucgccauu

SEQ ID NO: 3471 - RNA, 19 nt, Artificial Sequence
  Synthetic
cauacaaggcuuauucuua

SEQ ID NO: 3472 - RNA, 19 nt, Artificial Sequence
  Synthetic
guguagucuuccagauuau

SEQ ID NO: 3473 - RNA, 19 nt, Artificial Sequence
  Synthetic
gcacaccaacugaggaaca

SEQ ID NO: 3474 - RNA, 19 nt, Artificial Sequence
  Synthetic
gaggauugcccaagaaacu

SEQ ID NO: 3475 - RNA, 19 nt, Artificial Sequence
  Synthetic
agaugaaaauggaguucua

SEQ ID NO: 3476 - RNA, 19 nt, Artificial Sequence
  Synthetic
ccacacaggcacugaaaau

SEQ ID NO: 3477 - RNA, 19 nt, Artificial Sequence
  Synthetic
ggauaauagucuugugcug

SEQ ID NO: 3478 - RNA, 19 nt, Artificial Sequence
  Synthetic
gaaaaugcauuagggaaaa

SEQ ID NO: 3479 - RNA, 19 nt, Artificial Sequence
  Synthetic
guagaagugaguuuguaaa

SEQ ID NO: 3480 - RNA, 19 nt, Artificial Sequence
  Synthetic
aguaaaugcuguagaagug

SEQ ID NO: 3481 - RNA, 19 nt, Artificial Sequence
  Synthetic
agaagaaccugaugacaaa

SEQ ID NO: 3482 - RNA, 19 nt, Artificial Sequence
  Synthetic
gaacaugaccucuggcaua

SEQ ID NO: 3483 - RNA, 19 nt, Artificial Sequence
  Synthetic
gggauuuccugcagauaaa

SEQ ID NO: 3484 - RNA, 19 nt, Artificial Sequence
  Synthetic
guguauauuugcagaacua

SEQ ID NO: 3485 - RNA, 19 nt, Artificial Sequence
  Synthetic
ggaaagaugggaaggauga

SEQ ID NO: 3486 - RNA, 19 nt, Artificial Sequence
  Synthetic
gauaaagauugggaagaua

SEQ ID NO: 3487 - RNA, 19 nt, Artificial Sequence
  Synthetic
aagaagaaccugaugacaa

SEQ ID NO: 3488 - RNA, 19 nt, Artificial Sequence
  Synthetic
gggugaagguccugagcga

SEQ ID NO: 3489 - RNA, 19 nt, Artificial Sequence
  Synthetic
cuacaaagccaagaggaaa

SEQ ID NO: 3490 - RNA, 19 nt, Artificial Sequence
  Synthetic
ucuacaaagccaagaggaa

SEQ ID NO: 3491 - RNA, 19 nt, Artificial Sequence
  Synthetic
agauaaagauugggaagau

SEQ ID NO: 3492 - RNA, 19 nt, Artificial Sequence
  Synthetic
gagcaaggcauuauaccaa

SEQ ID NO: 3493 - RNA, 19 nt, Artificial Sequence
  Synthetic
ggaaggaugauaaagacua

SEQ ID NO: 3494 - RNA, 19 nt, Artificial Sequence
  Synthetic
gcuauugauauuugggcua

SEQ ID NO: 3495 - RNA, 19 nt, Artificial Sequence
  Synthetic
caagaagccaguucaguua

SEQ ID NO: 3496 - RNA, 19 nt, Artificial Sequence
  Synthetic
gaagaaauacguauaccaa

SEQ ID NO: 3497 - RNA, 19 nt, Artificial Sequence
  Synthetic
ggacagaauauucaaugua

SEQ ID NO: 3498 - RNA, 19 nt, Artificial Sequence
  Synthetic
gaaggaugauaaagacuau

SEQ ID NO: 3499 - RNA, 19 nt, Artificial Sequence
  Synthetic
ucgaggaccuguuugaaua

SEQ ID NO: 3500 - RNA, 19 nt, Artificial Sequence
  Synthetic
ccaagaggaaagaugggaa

SEQ ID NO: 3501 - RNA, 19 nt, Artificial Sequence
  Synthetic
cguugaagaaagugagagu

SEQ ID NO: 3502 - RNA, 19 nt, Artificial Sequence
  Synthetic
caguuuguguuguggauuu

SEQ ID NO: 3503 - RNA, 19 nt, Artificial Sequence
  Synthetic
agaaauacguauaccaacu

SEQ ID NO: 3504 - RNA, 19 nt, Artificial Sequence
  Synthetic
gaagaaagugagaguuguu

SEQ ID NO: 3505 - RNA, 19 nt, Artificial Sequence
  Synthetic
aggcauuauaccaaagcua

SEQ ID NO: 3506 - RNA, 19 nt, Artificial Sequence
  Synthetic
augucggcauguagagaaa

SEQ ID NO: 3507 - RNA, 19 nt, Artificial Sequence
  Synthetic
gcauuauaccaaagcuauu

SEQ ID NO: 3508 - RNA, 19 nt, Artificial Sequence
  Synthetic
gaguuagacuugaaaagaa

SEQ ID NO: 3509 - RNA, 19 nt, Artificial Sequence
  Synthetic
ugaugacaaaggagacaaa

SEQ ID NO: 3510 - RNA, 19 nt, Artificial Sequence
  Synthetic
ccgcagagcagcaugggau

SEQ ID NO: 3511 - RNA, 19 nt, Artificial Sequence
  Synthetic
ggccaaacguggacaacua

SEQ ID NO: 3512 - RNA, 19 nt, Artificial Sequence
  Synthetic
gugaugaaguuuccaaaua

SEQ ID NO: 3513 - RNA, 19 nt, Artificial Sequence
  Synthetic
agacagggcauuugaguuu

SEQ ID NO: 3514 - RNA, 19 nt, Artificial Sequence
  Synthetic
aagaaggugcugauggaaa

SEQ ID NO: 3515 - RNA, 19 nt, Artificial Sequence
  Synthetic
ggccagaagcggaagguga

SEQ ID NO: 3516 - RNA, 19 nt, Artificial Sequence
  Synthetic
agaaggugcugauggaaaa

SEQ ID NO: 3517 - RNA, 19 nt, Artificial Sequence
  Synthetic
ggagaauuuuacuguguuu

SEQ ID NO: 3518 - RNA, 19 nt, Artificial Sequence
  Synthetic
acuaugagcuguacgaaaa

SEQ ID NO: 3519 - RNA, 19 nt, Artificial Sequence
  Synthetic
guauauaccugguguucga

SEQ ID NO: 3520 - RNA, 19 nt, Artificial Sequence
  Synthetic
ucuacuacauccacagaaa

SEQ ID NO: 3521 - RNA, 19 nt, Artificial Sequence
  Synthetic
ugaagaaggugcugaugga

SEQ ID NO: 3522 - RNA, 19 nt, Artificial Sequence
  Synthetic
ccuccgaccucaagggcau

SEQ ID NO: 3523 - RNA, 19 nt, Artificial Sequence
  Synthetic
ggacaugaaggcugcuaau

SEQ ID NO: 3524 - RNA, 19 nt, Artificial Sequence
  Synthetic
agaagguggcucugaagaa

SEQ ID NO: 3525 - RNA, 19 nt, Artificial Sequence
  Synthetic
ucugagaucaagaggguga

SEQ ID NO: 3526 - RNA, 19 nt, Artificial Sequence
  Synthetic
ggccuaacccucagaaaca

SEQ ID NO: 3527 - RNA, 19 nt, Artificial Sequence
  Synthetic
gaaacaagauccugcauag

SEQ ID NO: 3528 - RNA, 19 nt, Artificial Sequence
  Synthetic
gccagaagcggaaggugaa

SEQ ID NO: 3529 - RNA, 19 nt, Artificial Sequence
  Synthetic
cagccuugcgggagaucaa

SEQ ID NO: 3530 - RNA, 19 nt, Artificial Sequence
  Synthetic
ggacuggaguggagcauug

SEQ ID NO: 3531 - RNA, 19 nt, Artificial Sequence
  Synthetic
acgagaauguggucaacuu

SEQ ID NO: 3532 - RNA, 19 nt, Artificial Sequence
  Synthetic
ccaagaacagccagcccaa

SEQ ID NO: 3533 - RNA, 19 nt, Artificial Sequence
  Synthetic
gaugguucccagaggguuu

SEQ ID NO: 3534 - RNA, 19 nt, Artificial Sequence
  Synthetic
guuugguccguuagaauua

SEQ ID NO: 3535 - RNA, 19 nt, Artificial Sequence
  Synthetic
cacuagggcucuuguguuu

SEQ ID NO: 3536 - RNA, 19 nt, Artificial Sequence
  Synthetic
ucaagagggugaugcagau

SEQ ID NO: 3537 - RNA, 19 nt, Artificial Sequence
  Synthetic
agacggaguuugagcgcgu

SEQ ID NO: 3538 - RNA, 19 nt, Artificial Sequence
  Synthetic
aacuaugagcuguacgaaa

SEQ ID NO: 3539 - RNA, 19 nt, Artificial Sequence
  Synthetic
gggacaugaaggcugcuaa

SEQ ID NO: 3540 - RNA, 19 nt, Artificial Sequence
  Synthetic
uggacaacuaugagcugua

SEQ ID NO: 3541 - RNA, 19 nt, Artificial Sequence
  Synthetic
ccucuaugauggagaagua

SEQ ID NO: 3542 - RNA, 19 nt, Artificial Sequence
  Synthetic
cgaaacauuccgugauuaa

SEQ ID NO: 3543 - RNA, 19 nt, Artificial Sequence
  Synthetic
caauagaugcuuugaagaa

SEQ ID NO: 3544 - RNA, 19 nt, Artificial Sequence
  Synthetic
aggaagacccuaagaaaga

SEQ ID NO: 3545 - RNA, 19 nt, Artificial Sequence
  Synthetic
gauuaagcuuugugacuuu

SEQ ID NO: 3546 - RNA, 19 nt, Artificial Sequence
  Synthetic
caucagagaaauagaggau

SEQ ID NO: 3547 - RNA, 19 nt, Artificial Sequence
  Synthetic
caaggaagacccuaagaaa

SEQ ID NO: 3548 - RNA, 19 nt, Artificial Sequence
  Synthetic
ccauaaacacaauugcaua

SEQ ID NO: 3549 - RNA, 19 nt, Artificial Sequence
  Synthetic
ccaacaaggaagacccuaa

SEQ ID NO: 3550 - RNA, 19 nt, Artificial Sequence
  Synthetic
gagcauaacuuggcagaca

SEQ ID NO: 3551 - RNA, 19 nt, Artificial Sequence
  Synthetic
gcuaaggagagaugauuuu

SEQ ID NO: 3552 - RNA, 19 nt, Artificial Sequence
  Synthetic
cagcaaguguuuagcacga

SEQ ID NO: 3553 - RNA, 19 nt, Artificial Sequence
  Synthetic
uauggaaccacuugaauua

SEQ ID NO: 3554 - RNA, 19 nt, Artificial Sequence
  Synthetic
caccacugcuuuacagaaa

SEQ ID NO: 3555 - RNA, 19 nt, Artificial Sequence
  Synthetic
ugugauaccaagaaacuua

SEQ ID NO: 3556 - RNA, 19 nt, Artificial Sequence
  Synthetic
aaauguagaaacagggaca

SEQ ID NO: 3557 - RNA, 19 nt, Artificial Sequence
  Synthetic
gggaaauccgaaugcucaa

SEQ ID NO: 3558 - RNA, 19 nt, Artificial Sequence
  Synthetic
ugggaaaauuggagaagga

SEQ ID NO: 3559 - RNA, 19 nt, Artificial Sequence
  Synthetic
gaaaauugcccuucgggaa

SEQ ID NO: 3560 - RNA, 19 nt, Artificial Sequence
  Synthetic
ggcaaaagaacacgacaaa

SEQ ID NO: 3561 - RNA, 19 nt, Artificial Sequence
  Synthetic
gcuuugugacuuuggauuu

SEQ ID NO: 3562 - RNA, 19 nt, Artificial Sequence
  Synthetic
cuacugugauaccaagaaa

SEQ ID NO: 3563 - RNA, 19 nt, Artificial Sequence
  Synthetic
cuauggaguuguuuucaaa

SEQ ID NO: 3564 - RNA, 19 nt, Artificial Sequence
  Synthetic
uggcaaaagaacacaacaa

SEQ ID NO: 3565 - RNA, 19 nt, Artificial Sequence
  Synthetic
caacaaaccaacaaggaag

SEQ ID NO: 3566 - RNA, 19 nt, Artificial Sequence
  Synthetic
acaacaaaccaacaaggaa

SEQ ID NO: 3567 - RNA, 19 nt, Artificial Sequence
  Synthetic
gaacacaacaaaccaacaa

SEQ ID NO: 3568 - RNA, 19 nt, Artificial Sequence
  Synthetic
acugcaagcuguaaauuuu

SEQ ID NO: 3569 - RNA, 19 nt, Artificial Sequence
  Synthetic
gaaacagggacacggguca

SEQ ID NO: 3570 - RNA, 19 nt, Artificial Sequence
  Synthetic
aggaaucaauagaugcuuu

SEQ ID NO: 3571 - RNA, 19 nt, Artificial Sequence
  Synthetic
guacagagcuccagaacua

SEQ ID NO: 3572 - RNA, 19 nt, Artificial Sequence
  Synthetic
gugaugaaguguaggaaua

SEQ ID NO: 3573 - RNA, 19 nt, Artificial Sequence
  Synthetic
gaauaaagauacuggaaga

SEQ ID NO: 3574 - RNA, 19 nt, Artificial Sequence
  Synthetic
gcaaagaaaugcuuacaua

SEQ ID NO: 3575 - RNA, 19 nt, Artificial Sequence
  Synthetic
agauauaaagccagagaau

SEQ ID NO: 3576 - RNA, 19 nt, Artificial Sequence
  Synthetic
ggaguaagguugccugaaa

SEQ ID NO: 3577 - RNA, 19 nt, Artificial Sequence
  Synthetic
agaaagugacgaugacaaa

SEQ ID NO: 3578 - RNA, 19 nt, Artificial Sequence
  Synthetic
uuacagaguggaugagaaa

SEQ ID NO: 3579 - RNA, 19 nt, Artificial Sequence
  Synthetic
cgagaaaucaaguuacuaa

SEQ ID NO: 3580 - RNA, 19 nt, Artificial Sequence
  Synthetic
ccuuaguugaagaaagaaa

SEQ ID NO: 3581 - RNA, 19 nt, Artificial Sequence
  Synthetic
guaccuagucuuugaauuu

SEQ ID NO: 3582 - RNA, 19 nt, Artificial Sequence
  Synthetic
ggugauagauuuagcaaag

SEQ ID NO: 3583 - RNA, 19 nt, Artificial Sequence
  Synthetic
gaagaauuguggccauaaa

SEQ ID NO: 3584 - RNA, 19 nt, Artificial Sequence
  Synthetic
acacagagauauaaagcca

SEQ ID NO: 3585 - RNA, 19 nt, Artificial Sequence
  Synthetic
caaaacagaaagaaggaaa

SEQ ID NO: 3586 - RNA, 19 nt, Artificial Sequence
  Synthetic
ggaugaugcucuugcacuu

SEQ ID NO: 3587 - RNA, 19 nt, Artificial Sequence
  Synthetic
acagaaagaugccagaaau

SEQ ID NO: 3588 - RNA, 19 nt, Artificial Sequence
  Synthetic
guuacagaguggaugagaa

SEQ ID NO: 3589 - RNA, 19 nt, Artificial Sequence
  Synthetic
ucucugaaguggugauaga

SEQ ID NO: 3590 - RNA, 19 nt, Artificial Sequence
  Synthetic
uggaauugcuaguuugcua

SEQ ID NO: 3591 - RNA, 19 nt, Artificial Sequence
  Synthetic
gauauaaagccagagaaua

SEQ ID NO: 3592 - RNA, 19 nt, Artificial Sequence
  Synthetic
ggagaagggaguuauggaa

SEQ ID NO: 3593 - RNA, 19 nt, Artificial Sequence
  Synthetic
guuauggaauggugaugaa

SEQ ID NO: 3594 - RNA, 19 nt, Artificial Sequence
  Synthetic
ccucaaagacugcagcaau

SEQ ID NO: 3595 - RNA, 19 nt, Artificial Sequence
  Synthetic
cuauaccaauucaggguua

SEQ ID NO: 3596 - RNA, 19 nt, Artificial Sequence
  Synthetic
cugaaguggugauagauuu

SEQ ID NO: 3597 - RNA, 19 nt, Artificial Sequence
  Synthetic
ccaaguaguucaaaaguau

SEQ ID NO: 3598 - RNA, 19 nt, Artificial Sequence
  Synthetic
uggaagaauuguggccaua

SEQ ID NO: 3599 - RNA, 19 nt, Artificial Sequence
  Synthetic
acacaauucuugaugacuu

SEQ ID NO: 3600 - RNA, 19 nt, Artificial Sequence
  Synthetic
cuuggaaguguguaagaaa

SEQ ID NO: 3601 - RNA, 19 nt, Artificial Sequence
  Synthetic
uguaauggcuugaaagaaa

SEQ ID NO: 3602 - RNA, 19 nt, Artificial Sequence
  Synthetic
guauagagcucccgaauua

SEQ ID NO: 3603 - RNA, 19 nt, Artificial Sequence
  Synthetic
gaucaaagucagaguuauu

SEQ ID NO: 3604 - RNA, 19 nt, Artificial Sequence
  Synthetic
ucaggaaagaugaaagaaa

SEQ ID NO: 3605 - RNA, 19 nt, Artificial Sequence
  Synthetic
guaugaaacccuuggaaaa

SEQ ID NO: 3606 - RNA, 19 nt, Artificial Sequence
  Synthetic
caggaaagaugaaagaaaa

SEQ ID NO: 3607 - RNA, 19 nt, Artificial Sequence
  Synthetic
gaacagucaugaaauguaa

SEQ ID NO: 3608 - RNA, 19 nt, Artificial Sequence
  Synthetic
gucauggacuagagaguaa

SEQ ID NO: 3609 - RNA, 19 nt, Artificial Sequence
  Synthetic
caaaggaggaagaggagau

SEQ ID NO: 3610 - RNA, 19 nt, Artificial Sequence
  Synthetic
gauaguggccauuaagaua

SEQ ID NO: 3611 - RNA, 19 nt, Artificial Sequence
  Synthetic
gagaucaaagucagaguua

SEQ ID NO: 3612 - RNA, 19 nt, Artificial Sequence
  Synthetic
agaacaaucugucaacaaa

SEQ ID NO: 3613 - RNA, 19 nt, Artificial Sequence
  Synthetic
agucaaaggaggaagagga

SEQ ID NO: 3614 - RNA, 19 nt, Artificial Sequence
  Synthetic
ugccagaacugaaagcuaa

SEQ ID NO: 3615 - RNA, 19 nt, Artificial Sequence
  Synthetic
caacaggaugcaaaugaaa

SEQ ID NO: 3616 - RNA, 19 nt, Artificial Sequence
  Synthetic
cauccuaugucuccagaua

SEQ ID NO: 3617 - RNA, 19 nt, Artificial Sequence
  Synthetic
ugagauggccacuggaaau

SEQ ID NO: 3618 - RNA, 19 nt, Artificial Sequence
  Synthetic
acauuauugucauggacua

SEQ ID NO: 3619 - RNA, 19 nt, Artificial Sequence
  Synthetic
guaaacugaacuugaagaa

SEQ ID NO: 3620 - RNA, 19 nt, Artificial Sequence
  Synthetic
cagagaagaaaccuaaaua

SEQ ID NO: 3621 - RNA, 19 nt, Artificial Sequence
  Synthetic
uaagaauacugggcagaua

SEQ ID NO: 3622 - RNA, 19 nt, Artificial Sequence
  Synthetic
ccagauccuucgagcaauu

SEQ ID NO: 3623 - RNA, 19 nt, Artificial Sequence
  Synthetic
aaaauugcgaugagagaaa

SEQ ID NO: 3624 - RNA, 19 nt, Artificial Sequence
  Synthetic
caguauuagaugaguuaca

SEQ ID NO: 3625 - RNA, 19 nt, Artificial Sequence
  Synthetic
uauuaaagucaaaggagga

SEQ ID NO: 3626 - RNA, 19 nt, Artificial Sequence
  Synthetic
uguaugaaacccuuggaaa

SEQ ID NO: 3627 - RNA, 19 nt, Artificial Sequence
  Synthetic
uaacagagaagaaaccuaa

SEQ ID NO: 3628 - RNA, 19 nt, Artificial Sequence
  Synthetic
gcucugugauuuugguuuu

SEQ ID NO: 3629 - RNA, 19 nt, Artificial Sequence
  Synthetic
ggaacagucaugaaaugua

SEQ ID NO: 3630 - RNA, 19 nt, Artificial Sequence
  Synthetic
agauauaguucaugcuugu

SEQ ID NO: 3631 - RNA, 19 nt, Artificial Sequence
  Synthetic
caaaguaccucaagucaaa

SEQ ID NO: 3632 - RNA, 19 nt, Artificial Sequence
  Synthetic
cggcauagcuauauugaca

SEQ ID NO: 3633 - RNA, 19 nt, Artificial Sequence
  Synthetic
ucgaauugcuggaagaaau

SEQ ID NO: 3634 - RNA, 19 nt, Artificial Sequence
  Synthetic
cgacagaacaacaaggaga

SEQ ID NO: 3635 - RNA, 19 nt, Artificial Sequence
  Synthetic
gaagaaaucucaaacagua

SEQ ID NO: 3636 - RNA, 19 nt, Artificial Sequence
  Synthetic
gcaaagaucucaccaacaa

SEQ ID NO: 3637 - RNA, 19 nt, Artificial Sequence
  Synthetic
caaggaaacacaugaaauu

SEQ ID NO: 3638 - RNA, 19 nt, Artificial Sequence
  Synthetic
guacuuaaaugcagacaca

SEQ ID NO: 3639 - RNA, 19 nt, Artificial Sequence
  Synthetic
ggaaagcucucaaagcaaa

SEQ ID NO: 3640 - RNA, 19 nt, Artificial Sequence
  Synthetic
guaugugacccgugacaaa

SEQ ID NO: 3641 - RNA, 19 nt, Artificial Sequence
  Synthetic
caaaagaagccaagucaaa

SEQ ID NO: 3642 - RNA, 19 nt, Artificial Sequence
  Synthetic
cuaagacgauggaggaauu

SEQ ID NO: 3643 - RNA, 19 nt, Artificial Sequence
  Synthetic
acuccaagucugugagcaa

SEQ ID NO: 3644 - RNA, 19 nt, Artificial Sequence
  Synthetic
aagaagauaccuuggaauu

SEQ ID NO: 3645 - RNA, 19 nt, Artificial Sequence
  Synthetic
gcuauucacuggugccaua

SEQ ID NO: 3646 - RNA, 19 nt, Artificial Sequence
  Synthetic
guuaaggacgacagaacaa

SEQ ID NO: 3647 - RNA, 19 nt, Artificial Sequence
  Synthetic
cagagcaacucaaggaaaa

SEQ ID NO: 3648 - RNA, 19 nt, Artificial Sequence
  Synthetic
cgacuuuacgagagcuuaa

SEQ ID NO: 3649 - RNA, 19 nt, Artificial Sequence
  Synthetic
ggaaaaguccugaaaauau

SEQ ID NO: 3650 - RNA, 19 nt, Artificial Sequence
  Synthetic
gagcauagggcaagggaug

SEQ ID NO: 3651 - RNA, 19 nt, Artificial Sequence
  Synthetic
agaaagugaaauugaccaa

SEQ ID NO: 3652 - RNA, 19 nt, Artificial Sequence
  Synthetic
gauauuguccaucgagaua

SEQ ID NO: 3653 - RNA, 19 nt, Artificial Sequence
  Synthetic
uggaagaaauaaccgaaau

SEQ ID NO: 3654 - RNA, 19 nt, Artificial Sequence
  Synthetic
aggaaaacauuguggaguu

SEQ ID NO: 3655 - RNA, 19 nt, Artificial Sequence
  Synthetic
aagcuugagcauagggcaa

SEQ ID NO: 3656 - RNA, 19 nt, Artificial Sequence
  Synthetic
ccaauuaacaccaaugaau

SEQ ID NO: 3657 - RNA, 19 nt, Artificial Sequence
  Synthetic
ccuauggaguuguacuuaa

SEQ ID NO: 3658 - RNA, 19 nt, Artificial Sequence
  Synthetic
auggaaaaguccugaaaau

SEQ ID NO: 3659 - RNA, 19 nt, Artificial Sequence
  Synthetic
augaaauuguggcgaucaa

SEQ ID NO: 3660 - RNA, 19 nt, Artificial Sequence
  Synthetic
uauuagucauucagagcaa

SEQ ID NO: 3661 - RNA, 19 nt, Artificial Sequence
  Synthetic
ccacaaugcugaauauaca

SEQ ID NO: 3662 - RNA, 19 nt, Artificial Sequence
  Synthetic
gaacaaggagucagacauu

SEQ ID NO: 3663 - RNA, 19 nt, Artificial Sequence
  Synthetic
guucauugcacuuugauua

SEQ ID NO: 3664 - RNA, 19 nt, Artificial Sequence
  Synthetic
gggaagggacacacaagaa

SEQ ID NO: 3665 - RNA, 19 nt, Artificial Sequence
  Synthetic
cgucagaacccaugcggca

SEQ ID NO: 3666 - RNA, 19 nt, Artificial Sequence
  Synthetic
ggaacaaggagucagacau

SEQ ID NO: 3667 - RNA, 19 nt, Artificial Sequence
  Synthetic
gccucuggcauuagaauua

SEQ ID NO: 3668 - RNA, 19 nt, Artificial Sequence
  Synthetic
cagaccagcaugacagauu

SEQ ID NO: 3669 - RNA, 19 nt, Artificial Sequence
  Synthetic
aaacuaggcgguugaauga

SEQ ID NO: 3670 - RNA, 19 nt, Artificial Sequence
  Synthetic
ggacagcagaggaagacca

SEQ ID NO: 3671 - RNA, 19 nt, Artificial Sequence
  Synthetic
cagcagaggaagaccaugu

SEQ ID NO: 3672 - RNA, 19 nt, Artificial Sequence
  Synthetic
aggaagaccauguggaccu

SEQ ID NO: 3673 - RNA, 19 nt, Artificial Sequence
  Synthetic
ugucacaggcgguuaugaa

SEQ ID NO: 3674 - RNA, 19 nt, Artificial Sequence
  Synthetic
agucagacauuuuaagaug

SEQ ID NO: 3675 - RNA, 19 nt, Artificial Sequence
  Synthetic
ccuaauccgcccacaggaa

SEQ ID NO: 3676 - RNA, 19 nt, Artificial Sequence
  Synthetic
cauuugagaaguaaacaga

SEQ ID NO: 3677 - RNA, 19 nt, Artificial Sequence
  Synthetic
ucacaggcgguuaugaaau

SEQ ID NO: 3678 - RNA, 19 nt, Artificial Sequence
  Synthetic
gaagggacacacaagaaga

SEQ ID NO: 3679 - RNA, 19 nt, Artificial Sequence
  Synthetic
gcgauggaacuucgacuuu

SEQ ID NO: 3680 - RNA, 19 nt, Artificial Sequence
  Synthetic
ccagcugggcucugcaauu

SEQ ID NO: 3681 - RNA, 19 nt, Artificial Sequence
  Synthetic
cacaggcgguuaugaaauu

SEQ ID NO: 3682 - RNA, 19 nt, Artificial Sequence
  Synthetic
ccuuccagcuccuguaaca

SEQ ID NO: 3683 - RNA, 19 nt, Artificial Sequence
  Synthetic
uuaagaugguggcaguaga

SEQ ID NO: 3684 - RNA, 19 nt, Artificial Sequence
  Synthetic
uuaaacaccuccucaugua

SEQ ID NO: 3685 - RNA, 19 nt, Artificial Sequence
  Synthetic
ccaccuagacuguaaaccu

SEQ ID NO: 3686 - RNA, 19 nt, Artificial Sequence
  Synthetic
gcugggaguaguugucuuu

SEQ ID NO: 3687 - RNA, 19 nt, Artificial Sequence
  Synthetic
acuaggcgguugaaugaga

SEQ ID NO: 3688 - RNA, 19 nt, Artificial Sequence
  Synthetic
uuugagaaguaaacagaug

SEQ ID NO: 3689 - RNA, 19 nt, Artificial Sequence
  Synthetic
agaccagcaugacagauuu

SEQ ID NO: 3690 - RNA, 19 nt, Artificial Sequence
  Synthetic
gaggaggcgccaugucaga

SEQ ID NO: 3691 - RNA, 19 nt, Artificial Sequence
  Synthetic
ggagcaaugcgcaggaaua

SEQ ID NO: 3692 - RNA, 19 nt, Artificial Sequence
  Synthetic
gaagguucauguagagaaa

SEQ ID NO: 3693 - RNA, 19 nt, Artificial Sequence
  Synthetic
aagcacacuuguaggauaa

SEQ ID NO: 3694 - RNA, 19 nt, Artificial Sequence
  Synthetic
caacagaacagaagaaaau

SEQ ID NO: 3695 - RNA, 19 nt, Artificial Sequence
  Synthetic
gagaagcacugcagagaca

SEQ ID NO: 3696 - RNA, 19 nt, Artificial Sequence
  Synthetic
gaauggacauccuguauaa

SEQ ID NO: 3697 - RNA, 19 nt, Artificial Sequence
  Synthetic
gaacacuggcuaaagauaa

SEQ ID NO: 3698 - RNA, 19 nt, Artificial Sequence
  Synthetic
acguaaacagcucgaauua

SEQ ID NO: 3699 - RNA, 19 nt, Artificial Sequence
  Synthetic
gagcaaugcgcaggaauaa

SEQ ID NO: 3700 - RNA, 19 nt, Artificial Sequence
  Synthetic
caaggaagauauacaugaa

SEQ ID NO: 3701 - RNA, 19 nt, Artificial Sequence
  Synthetic
ccaacagaacagaagaaaa

SEQ ID NO: 3702 - RNA, 19 nt, Artificial Sequence
  Synthetic
caacaacacaauaacacua

SEQ ID NO: 3703 - RNA, 19 nt, Artificial Sequence
  Synthetic
ggcuaaagauaauugcuau

SEQ ID NO: 3704 - RNA, 19 nt, Artificial Sequence
  Synthetic
gggaaggguuugaauuguu

SEQ ID NO: 3705 - RNA, 19 nt, Artificial Sequence
  Synthetic
aaagcacacuuguaggaua

SEQ ID NO: 3706 - RNA, 19 nt, Artificial Sequence
  Synthetic
ugaugaagcaaggaagaua

SEQ ID NO: 3707 - RNA, 19 nt, Artificial Sequence
  Synthetic
ggaagguucauguagagaa

SEQ ID NO: 3708 - RNA, 19 nt, Artificial Sequence
  Synthetic
gaagcaaggaagauauaca

SEQ ID NO: 3709 - RNA, 19 nt, Artificial Sequence
  Synthetic
aguuggaauuuaccaguua

SEQ ID NO: 3710 - RNA, 19 nt, Artificial Sequence
  Synthetic
gaugaagcaaggaagauau

SEQ ID NO: 3711 - RNA, 19 nt, Artificial Sequence
  Synthetic
ggagaaagaugucaaacgu

SEQ ID NO: 3712 - RNA, 19 nt, Artificial Sequence
  Synthetic
gcaaguggaauuucgauuu

SEQ ID NO: 3713 - RNA, 19 nt, Artificial Sequence
  Synthetic
gcagcuugcccgaguucua

SEQ ID NO: 3714 - RNA, 19 nt, Artificial Sequence
  Synthetic
acucaaaacaaaagagcca

SEQ ID NO: 3715 - RNA, 19 nt, Artificial Sequence
  Synthetic
cagcucgaauuaagaauau

SEQ ID NO: 3716 - RNA, 19 nt, Artificial Sequence
  Synthetic
gcaaggaagauauacauga

SEQ ID NO: 3717 - RNA, 19 nt, Artificial Sequence
  Synthetic
aaaggaagguucauguaga

SEQ ID NO: 3718 - RNA, 19 nt, Artificial Sequence
  Synthetic
ccgaggugcuugggaguuu

SEQ ID NO: 3719 - RNA, 19 nt, Artificial Sequence
  Synthetic
guuaauuacucagcagaau

SEQ ID NO: 3720 - RNA, 19 nt, Artificial Sequence
  Synthetic
caaacgugcgagugucuaa

SEQ ID NO: 3721 - RNA, 19 nt, Artificial Sequence
  Synthetic
ggaccgaaguggacagcga

SEQ ID NO: 3722 - RNA, 19 nt, Artificial Sequence
  Synthetic
gucccaaaguguaaagcuu

SEQ ID NO: 3723 - RNA, 19 nt, Artificial Sequence
  Synthetic
cugagaagucgucgggcga

SEQ ID NO: 3724 - RNA, 19 nt, Artificial Sequence
  Synthetic
gcagagcagcguucgguuu

SEQ ID NO: 3725 - RNA, 19 nt, Artificial Sequence
  Synthetic
uguuuaaucucugcugaaa

SEQ ID NO: 3726 - RNA, 19 nt, Artificial Sequence
  Synthetic
ccaauuuagagcccaaaga

SEQ ID NO: 3727 - RNA, 19 nt, Artificial Sequence
  Synthetic
aagguacacuggucccaaa

SEQ ID NO: 3728 - RNA, 19 nt, Artificial Sequence
  Synthetic
ugaaaacugugcaauguau

SEQ ID NO: 3729 - RNA, 19 nt, Artificial Sequence
  Synthetic
cggagcagcugccuagugu

SEQ ID NO: 3730 - RNA, 19 nt, Artificial Sequence
  Synthetic
uuuaaucucugcugaaacu

SEQ ID NO: 3731 - RNA, 19 nt, Artificial Sequence
  Synthetic
ggcugggaccguucaugua

SEQ ID NO: 3732 - RNA, 19 nt, Artificial Sequence
  Synthetic
ccgcugggauuacgacuuc

SEQ ID NO: 3733 - RNA, 19 nt, Artificial Sequence
  Synthetic
cagcugcacucggggauuu

SEQ ID NO: 3734 - RNA, 19 nt, Artificial Sequence
  Synthetic
ggccucugaucuccgauuu

SEQ ID NO: 3735 - RNA, 19 nt, Artificial Sequence
  Synthetic
gcugcggugagccaauuua

SEQ ID NO: 3736 - RNA, 19 nt, Artificial Sequence
  Synthetic
caauuuagagcccaaagag

SEQ ID NO: 3737 - RNA, 19 nt, Artificial Sequence
  Synthetic
gcggugagccaauuuagag

SEQ ID NO: 3738 - RNA, 19 nt, Artificial Sequence
  Synthetic
ccucugaucuccgauuucu

SEQ ID NO: 3739 - RNA, 19 nt, Artificial Sequence
  Synthetic
gcugggaccguucauguag

SEQ ID NO: 3740 - RNA, 19 nt, Artificial Sequence
  Synthetic
gaacgccgaggaccagaac

SEQ ID NO: 3741 - RNA, 19 nt, Artificial Sequence
  Synthetic
gaagucgucgggcgauguc

SEQ ID NO: 3742 - RNA, 19 nt, Artificial Sequence
  Synthetic
ucugaucuccgauuucuuc

SEQ ID NO: 3743 - RNA, 19 nt, Artificial Sequence
  Synthetic
gaccuucccaguacuagug

SEQ ID NO: 3744 - RNA, 19 nt, Artificial Sequence
  Synthetic
ggaaagaagggaagagugu

SEQ ID NO: 3745 - RNA, 19 nt, Artificial Sequence
  Synthetic
gagaaauguuaaagguuca

SEQ ID NO: 3746 - RNA, 19 nt, Artificial Sequence
  Synthetic
gcacuuaugcaguaaauua

SEQ ID NO: 3747 - RNA, 19 nt, Artificial Sequence
  Synthetic
aagcggauuuccagggaua

SEQ ID NO: 3748 - RNA, 19 nt, Artificial Sequence
  Synthetic
gguaagagaggaugugcaa

SEQ ID NO: 3749 - RNA, 19 nt, Artificial Sequence
  Synthetic
accacuaacuccugagaaa

SEQ ID NO: 3750 - RNA, 19 nt, Artificial Sequence
  Synthetic
gggaaagugcauaugaaau

SEQ ID NO: 3751 - RNA, 19 nt, Artificial Sequence
  Synthetic
gcugaggaguuauggugaa

SEQ ID NO: 3752 - RNA, 19 nt, Artificial Sequence
  Synthetic
guucauggguuuaccacua

SEQ ID NO: 3753 - RNA, 19 nt, Artificial Sequence
  Synthetic
ggucagacuaagaaauauu

SEQ ID NO: 3754 - RNA, 19 nt, Artificial Sequence
  Synthetic
gcgaggagaacaagggcau

SEQ ID NO: 3755 - RNA, 19 nt, Artificial Sequence
  Synthetic
gaggucagacuaagaaaua

SEQ ID NO: 3756 - RNA, 19 nt, Artificial Sequence
  Synthetic
cccaaaagauugcugaaaa

SEQ ID NO: 3757 - RNA, 19 nt, Artificial Sequence
  Synthetic
ggaaagugcauaugaaauc

SEQ ID NO: 3758 - RNA, 19 nt, Artificial Sequence
  Synthetic
aggaaaaccugaagacuga

SEQ ID NO: 3759 - RNA, 19 nt, Artificial Sequence
  Synthetic
uggcaagucacaugcguaa

SEQ ID NO: 3760 - RNA, 19 nt, Artificial Sequence
  Synthetic
gagggaaagugcauaugaa

SEQ ID NO: 3761 - RNA, 19 nt, Artificial Sequence
  Synthetic
ccugaagacugaggacaaa

SEQ ID NO: 3762 - RNA, 19 nt, Artificial Sequence
  Synthetic
gggagaaggcagugauuag

SEQ ID NO: 3763 - RNA, 19 nt, Artificial Sequence
  Synthetic
ggaagagugucguuaaguu

SEQ ID NO: 3764 - RNA, 19 nt, Artificial Sequence
  Synthetic
caggguugcuugaucauua

SEQ ID NO: 3765 - RNA, 19 nt, Artificial Sequence
  Synthetic
gcucuuaaauguagcaaug

SEQ ID NO: 3766 - RNA, 19 nt, Artificial Sequence
  Synthetic
gaagagugucguuaaguuu

SEQ ID NO: 3767 - RNA, 19 nt, Artificial Sequence
  Synthetic
gugguggaguggagugaga

SEQ ID NO: 3768 - RNA, 19 nt, Artificial Sequence
  Synthetic
cagcaacugucuuauuuaa

SEQ ID NO: 3769 - RNA, 19 nt, Artificial Sequence
  Synthetic
ggagugagagcaauuguaa

SEQ ID NO: 3770 - RNA, 19 nt, Artificial Sequence
  Synthetic
ccuuaugacuugcuacuuu

SEQ ID NO: 3771 - RNA, 19 nt, Artificial Sequence
  Synthetic
guuaaaaugugaggaagaa

SEQ ID NO: 3772 - RNA, 19 nt, Artificial Sequence
  Synthetic
gaauaaccuuccauacauu

SEQ ID NO: 3773 - RNA, 19 nt, Artificial Sequence
  Synthetic
acuaguggcucucaguuaa

SEQ ID NO: 3774 - RNA, 19 nt, Artificial Sequence
  Synthetic
gguuaugaaacuuggaaau

SEQ ID NO: 3775 - RNA, 19 nt, Artificial Sequence
  Synthetic
gggagggagugaaggaaaa

SEQ ID NO: 3776 - RNA, 19 nt, Artificial Sequence
  Synthetic
acaacaggcuuaugaauau

SEQ ID NO: 3777 - RNA, 19 nt, Artificial Sequence
  Synthetic
cgucaggacccuaaagaau

SEQ ID NO: 3778 - RNA, 19 nt, Artificial Sequence
  Synthetic
ugaaacugcauaagugaaa

SEQ ID NO: 3779 - RNA, 19 nt, Artificial Sequence
  Synthetic
ccacaaaucuucaauaaac

SEQ ID NO: 3780 - RNA, 19 nt, Artificial Sequence
  Synthetic
ggaaugagguuguuagccu

SEQ ID NO: 3781 - RNA, 19 nt, Artificial Sequence
  Synthetic
ucauagggguuaagcuaaa

SEQ ID NO: 3782 - RNA, 19 nt, Artificial Sequence
  Synthetic
agccacaaaucuucaauaa

SEQ ID NO: 3783 - RNA, 19 nt, Artificial Sequence
  Synthetic
agacuuugcuggaguuuca

SEQ ID NO: 3784 - RNA, 19 nt, Artificial Sequence
  Synthetic
aggcagaucuuacuaguau

SEQ ID NO: 3785 - RNA, 19 nt, Artificial Sequence
  Synthetic
cagcagaaagccugaacga

SEQ ID NO: 3786 - RNA, 19 nt, Artificial Sequence
  Synthetic
ugguggaguuccuggugaa

SEQ ID NO: 3787 - RNA, 19 nt, Artificial Sequence
  Synthetic
auguaaacgucaaugcaca

SEQ ID NO: 3788 - RNA, 19 nt, Artificial Sequence
  Synthetic
ggcaacagaagcagcaauu

SEQ ID NO: 3789 - RNA, 19 nt, Artificial Sequence
  Synthetic
cgaggauaaugaagggaac

SEQ ID NO: 3790 - RNA, 19 nt, Artificial Sequence
  Synthetic
aagcucuacuccagauuaa

SEQ ID NO: 3791 - RNA, 19 nt, Artificial Sequence
  Synthetic
gggaucagcuacaaaagaa

SEQ ID NO: 3792 - RNA, 19 nt, Artificial Sequence
  Synthetic
uacaacaggcuuaugaaua

SEQ ID NO: 3793 - RNA, 19 nt, Artificial Sequence
  Synthetic
gccacaaaucuucaauaaa

SEQ ID NO: 3794 - RNA, 19 nt, Artificial Sequence
  Synthetic
uguaaacgucaaugcacaa

SEQ ID NO: 3795 - RNA, 19 nt, Artificial Sequence
  Synthetic
agguuaugaaacuuggaaa

SEQ ID NO: 3796 - RNA, 19 nt, Artificial Sequence
  Synthetic
caguuuugcugaauaauca

SEQ ID NO: 3797 - RNA, 19 nt, Artificial Sequence
  Synthetic
aguuucaagcugauguuaa

SEQ ID NO: 3798 - RNA, 19 nt, Artificial Sequence
  Synthetic
gaguagcucuccugacuuu

SEQ ID NO: 3799 - RNA, 19 nt, Artificial Sequence
  Synthetic
caacagaagcagcaauugu

SEQ ID NO: 3800 - RNA, 19 nt, Artificial Sequence
  Synthetic
caacaggcuuaugaauaua

SEQ ID NO: 3801 - RNA, 19 nt, Artificial Sequence
  Synthetic
ccuuaaaacucugccguua

SEQ ID NO: 3802 - RNA, 19 nt, Artificial Sequence
  Synthetic
gccucuacuuuaucaauua

SEQ ID NO: 3803 - RNA, 19 nt, Artificial Sequence
  Synthetic
caagggagggagugaagga

SEQ ID NO: 3804 - RNA, 19 nt, Artificial Sequence
  Synthetic
gcuuauagguguugguuuu

SEQ ID NO: 3805 - RNA, 19 nt, Artificial Sequence
  Synthetic
caauaagaagguagaauga

SEQ ID NO: 3806 - RNA, 19 nt, Artificial Sequence
  Synthetic
aauuaagacuugugcauga

SEQ ID NO: 3807 - RNA, 19 nt, Artificial Sequence
  Synthetic
gggcagagcauuuaagagu

SEQ ID NO: 3808 - RNA, 19 nt, Artificial Sequence
  Synthetic
gcagagcauuuaagaguga

SEQ ID NO: 3809 - RNA, 19 nt, Artificial Sequence
  Synthetic
aagaagguagaaugaguua

SEQ ID NO: 3810 - RNA, 19 nt, Artificial Sequence
  Synthetic
auaagaagguagaaugagu

SEQ ID NO: 3811 - RNA, 19 nt, Artificial Sequence
  Synthetic
gaagagaggggaagaaaca

SEQ ID NO: 3812 - RNA, 19 nt, Artificial Sequence
  Synthetic
uggcaguucaagaggguca

SEQ ID NO: 3813 - RNA, 19 nt, Artificial Sequence
  Synthetic
cgucccaaaucaauaagaa

SEQ ID NO: 3814 - RNA, 19 nt, Artificial Sequence
  Synthetic
guacagcguuuuaaaagaa

SEQ ID NO: 3815 - RNA, 19 nt, Artificial Sequence
  Synthetic
cucaggaccucguggacau

SEQ ID NO: 3816 - RNA, 19 nt, Artificial Sequence
  Synthetic
ggacguuucucauuuguuu

SEQ ID NO: 3817 - RNA, 19 nt, Artificial Sequence
  Synthetic
ccaaaucaauaagaaggua

SEQ ID NO: 3818 - RNA, 19 nt, Artificial Sequence
  Synthetic
gguagaaugaguuaugagu

SEQ ID NO: 3819 - RNA, 19 nt, Artificial Sequence
  Synthetic
gcauuuaagagugaaguca

SEQ ID NO: 3820 - RNA, 19 nt, Artificial Sequence
  Synthetic
ggagcgucccaaaucaaua

SEQ ID NO: 3821 - RNA, 19 nt, Artificial Sequence
  Synthetic
agacggcgcugcaggucau

SEQ ID NO: 3822 - RNA, 19 nt, Artificial Sequence
  Synthetic
guagaaugaguuaugaguu

SEQ ID NO: 3823 - RNA, 19 nt, Artificial Sequence
  Synthetic
ccaccuaaacgguucaguu

SEQ ID NO: 3824 - RNA, 19 nt, Artificial Sequence
  Synthetic
gguuauguaucagaagaga

SEQ ID NO: 3825 - RNA, 19 nt, Artificial Sequence
  Synthetic
ucaauaagaagguagaaug

SEQ ID NO: 3826 - RNA, 19 nt, Artificial Sequence
  Synthetic
gagcgucccaaaucaauaa

SEQ ID NO: 3827 - RNA, 19 nt, Artificial Sequence
  Synthetic
gaagguagaaugaguuaug

SEQ ID NO: 3828 - RNA, 19 nt, Artificial Sequence
  Synthetic
uaagaagguagaaugaguu

SEQ ID NO: 3829 - RNA, 19 nt, Artificial Sequence
  Synthetic
guaccaguccaguccauga

SEQ ID NO: 3830 - RNA, 19 nt, Artificial Sequence
  Synthetic
caauccaucuggcaguuca

SEQ ID NO: 3831 - RNA, 19 nt, Artificial Sequence
  Synthetic
ccaagggcagagcauuuaa

SEQ ID NO: 3832 - RNA, 19 nt, Artificial Sequence
  Synthetic
ggagcuggcacugcagaga

SEQ ID NO: 3833 - RNA, 19 nt, Artificial Sequence
  Synthetic
uaagacuugugcaugauca

SEQ ID NO: 3834 - RNA, 19 nt, Artificial Sequence
  Synthetic
acuaaagagcugugguaua

SEQ ID NO: 3835 - RNA, 19 nt, Artificial Sequence
  Synthetic
ccaucaagcaauacaauua

SEQ ID NO: 3836 - RNA, 19 nt, Artificial Sequence
  Synthetic
ugucaguucucuagcauaa

SEQ ID NO: 3837 - RNA, 19 nt, Artificial Sequence
  Synthetic
gaacuaaagagcuguggua

SEQ ID NO: 3838 - RNA, 19 nt, Artificial Sequence
  Synthetic
caaauuagcugcacaucua

SEQ ID NO: 3839 - RNA, 19 nt, Artificial Sequence
  Synthetic
ugaaauaauggaagagcuu

SEQ ID NO: 3840 - RNA, 19 nt, Artificial Sequence
  Synthetic
gcagauauuccuaaaguuu

SEQ ID NO: 3841 - RNA, 19 nt, Artificial Sequence
  Synthetic
ggacaaauuagcugcacau

SEQ ID NO: 3842 - RNA, 19 nt, Artificial Sequence
  Synthetic
cacaauaucaccagagcaa

SEQ ID NO: 3843 - RNA, 19 nt, Artificial Sequence
  Synthetic
cuucaugaguuucgggaca

SEQ ID NO: 3844 - RNA, 19 nt, Artificial Sequence
  Synthetic
aaugaaaccaccaguguua

SEQ ID NO: 3845 - RNA, 19 nt, Artificial Sequence
  Synthetic
gcugugaaauaauggaaga

SEQ ID NO: 3846 - RNA, 19 nt, Artificial Sequence
  Synthetic
cagaagaacuaaagagcug

SEQ ID NO: 3847 - RNA, 19 nt, Artificial Sequence
  Synthetic
gaacagacuccaauucaua

SEQ ID NO: 3848 - RNA, 19 nt, Artificial Sequence
  Synthetic
cuauggaggacuugggaga

SEQ ID NO: 3849 - RNA, 19 nt, Artificial Sequence
  Synthetic
cuuccagguuguaaauuua

SEQ ID NO: 3850 - RNA, 19 nt, Artificial Sequence
  Synthetic
ugaagagccuauugaagau

SEQ ID NO: 3851 - RNA, 19 nt, Artificial Sequence
  Synthetic
gggacaaauuagcugcaca

SEQ ID NO: 3852 - RNA, 19 nt, Artificial Sequence
  Synthetic
augaagagccuauugaaga

SEQ ID NO: 3853 - RNA, 19 nt, Artificial Sequence
  Synthetic
gggcaauacagaccaucaa

SEQ ID NO: 3854 - RNA, 19 nt, Artificial Sequence
  Synthetic
ccauagacagccugcgaga

SEQ ID NO: 3855 - RNA, 19 nt, Artificial Sequence
  Synthetic
gagcuuacaaccugccuua

SEQ ID NO: 3856 - RNA, 19 nt, Artificial Sequence
  Synthetic
ccgcccaguucaauacaaa

SEQ ID NO: 3857 - RNA, 19 nt, Artificial Sequence
  Synthetic
uguuagaagaaauguccaa

SEQ ID NO: 3858 - RNA, 19 nt, Artificial Sequence
  Synthetic
cuaccagcaauguggaauu

SEQ ID NO: 3859 - RNA, 19 nt, Artificial Sequence
  Synthetic
gugaaauaauggaagagcu

SEQ ID NO: 3860 - RNA, 19 nt, Artificial Sequence
  Synthetic
gcuuacaaccugccuuaaa

SEQ ID NO: 3861 - RNA, 19 nt, Artificial Sequence
  Synthetic
cugcgagaccuaagaggau

SEQ ID NO: 3862 - RNA, 19 nt, Artificial Sequence
  Synthetic
cugugguauacaagacaua

SEQ ID NO: 3863 - RNA, 19 nt, Artificial Sequence
  Synthetic
guucaauacaaacaaguga

SEQ ID NO: 3864 - RNA, 19 nt, Artificial Sequence
  Synthetic
cagaagugcugguuagaua

SEQ ID NO: 3865 - RNA, 19 nt, Artificial Sequence
  Synthetic
ggaaagaaaccaaagauuu

SEQ ID NO: 3866 - RNA, 19 nt, Artificial Sequence
  Synthetic
ggacaaggcaagcggauau

SEQ ID NO: 3867 - RNA, 19 nt, Artificial Sequence
  Synthetic
gcuccugguuggaaagaaa

SEQ ID NO: 3868 - RNA, 19 nt, Artificial Sequence
  Synthetic
acgaggaauugaagagaau

SEQ ID NO: 3869 - RNA, 19 nt, Artificial Sequence
  Synthetic
caacaguguaguuuagaaa

SEQ ID NO: 3870 - RNA, 19 nt, Artificial Sequence
  Synthetic
ccaaaugguucaauaauga

SEQ ID NO: 3871 - RNA, 19 nt, Artificial Sequence
  Synthetic
gaucaucgccguugaggaa

SEQ ID NO: 3872 - RNA, 19 nt, Artificial Sequence
  Synthetic
gcuuaaacuuugaucugua

SEQ ID NO: 3873 - RNA, 19 nt, Artificial Sequence
  Synthetic
cgaagcacauggaggauga

SEQ ID NO: 3874 - RNA, 19 nt, Artificial Sequence
  Synthetic
gcggauauaugaaagaaaa

SEQ ID NO: 3875 - RNA, 19 nt, Artificial Sequence
  Synthetic
ggaagcuggcaguguguaa

SEQ ID NO: 3876 - RNA, 19 nt, Artificial Sequence
  Synthetic
gaucugaaauguuugagaa

SEQ ID NO: 3877 - RNA, 19 nt, Artificial Sequence
  Synthetic
agaaagcacuguaugguuu

SEQ ID NO: 3878 - RNA, 19 nt, Artificial Sequence
  Synthetic
ggccaaagaggaagcauuu

SEQ ID NO: 3879 - RNA, 19 nt, Artificial Sequence
  Synthetic
ggaccugauucuaguuuau

SEQ ID NO: 3880 - RNA, 19 nt, Artificial Sequence
  Synthetic
acucuuugcacgaggaauu

SEQ ID NO: 3881 - RNA, 19 nt, Artificial Sequence
  Synthetic
caacggacugcguguguua

SEQ ID NO: 3882 - RNA, 19 nt, Artificial Sequence
  Synthetic
guaaagcacuggcaaguuu

SEQ ID NO: 3883 - RNA, 19 nt, Artificial Sequence
  Synthetic
cgucgaagcacauggagga

SEQ ID NO: 3884 - RNA, 19 nt, Artificial Sequence
  Synthetic
gcacuggccucuuagguuu

SEQ ID NO: 3885 - RNA, 19 nt, Artificial Sequence
  Synthetic
caguuuacgucgaagcaca

SEQ ID NO: 3886 - RNA, 19 nt, Artificial Sequence
  Synthetic
acaauuagcaguuaugcaa

SEQ ID NO: 3887 - RNA, 19 nt, Artificial Sequence
  Synthetic
caccuguacuuuagaguuu

SEQ ID NO: 3888 - RNA, 19 nt, Artificial Sequence
  Synthetic
gguugggucuugccagaua

SEQ ID NO: 3889 - RNA, 19 nt, Artificial Sequence
  Synthetic
guuaguggcucuauugcaa

SEQ ID NO: 3890 - RNA, 19 nt, Artificial Sequence
  Synthetic
gggaagugguugauuaucu

SEQ ID NO: 3891 - RNA, 19 nt, Artificial Sequence
  Synthetic
gucaaauaccaaugcuuua

SEQ ID NO: 3892 - RNA, 19 nt, Artificial Sequence
  Synthetic
gucaagaaauuccaguuua

SEQ ID NO: 3893 - RNA, 19 nt, Artificial Sequence
  Synthetic
ccaaggagacucuguauga

SEQ ID NO: 3894 - RNA, 19 nt, Artificial Sequence
  Synthetic
ggaauaacucacagggaua

SEQ ID NO: 3895 - RNA, 19 nt, Artificial Sequence
  Synthetic
gggaaaggaugaauagaau

SEQ ID NO: 3896 - RNA, 19 nt, Artificial Sequence
  Synthetic
cagaauagagccagacaua

SEQ ID NO: 3897 - RNA, 19 nt, Artificial Sequence
  Synthetic
gaauagaguaacugaagaa

SEQ ID NO: 3898 - RNA, 19 nt, Artificial Sequence
  Synthetic
ggucuuuccuuaugggaua

SEQ ID NO: 3899 - RNA, 19 nt, Artificial Sequence
  Synthetic
caaauuggaugcagacaaa

SEQ ID NO: 3900 - RNA, 19 nt, Artificial Sequence
  Synthetic
gauuggaguucaagagaca

SEQ ID NO: 3901 - RNA, 19 nt, Artificial Sequence
  Synthetic
cagugaagauuguagauau

SEQ ID NO: 3902 - RNA, 19 nt, Artificial Sequence
  Synthetic
gaaagagacuugugagaag

SEQ ID NO: 3903 - RNA, 19 nt, Artificial Sequence
  Synthetic
gcuuuugaauagucaguua

SEQ ID NO: 3904 - RNA, 19 nt, Artificial Sequence
  Synthetic
gcaacaguauuucgguaua

SEQ ID NO: 3905 - RNA, 19 nt, Artificial Sequence
  Synthetic
caacaaaccccucaagaaa

SEQ ID NO: 3906 - RNA, 19 nt, Artificial Sequence
  Synthetic
guauaauaaucgugagcgu

SEQ ID NO: 3907 - RNA, 19 nt, Artificial Sequence
  Synthetic
gugaagaaaaugugaagua

SEQ ID NO: 3908 - RNA, 19 nt, Artificial Sequence
  Synthetic
acugauaggagaaacaaua

SEQ ID NO: 3909 - RNA, 19 nt, Artificial Sequence
  Synthetic
uaucaaugccugaaagaga

SEQ ID NO: 3910 - RNA, 19 nt, Artificial Sequence
  Synthetic
cugaaagagacuugugaga

SEQ ID NO: 3911 - RNA, 19 nt, Artificial Sequence
  Synthetic
ucugaagagaagagaauuu

SEQ ID NO: 3912 - RNA, 19 nt, Artificial Sequence
  Synthetic
gcaaauaguaguuccugaa

SEQ ID NO: 3913 - RNA, 19 nt, Artificial Sequence
  Synthetic
aaagauagaugguacaaca

SEQ ID NO: 3914 - RNA, 19 nt, Artificial Sequence
  Synthetic
cugcaaugcucgcuggaga

SEQ ID NO: 3915 - RNA, 19 nt, Artificial Sequence
  Synthetic
gaagagaauuucaugcaga

SEQ ID NO: 3916 - RNA, 19 nt, Artificial Sequence
  Synthetic
guacaagggaucagcuuuu

SEQ ID NO: 3917 - RNA, 19 nt, Artificial Sequence
  Synthetic
gaguggcgauugugauuua

SEQ ID NO: 3918 - RNA, 19 nt, Artificial Sequence
  Synthetic
ggaaaggaugaauagaauu

SEQ ID NO: 3919 - RNA, 19 nt, Artificial Sequence
  Synthetic
ccgcacaggucuuuccuua

SEQ ID NO: 3920 - RNA, 19 nt, Artificial Sequence
  Synthetic
cuguaguggaggagagcuu

SEQ ID NO: 3921 - RNA, 19 nt, Artificial Sequence
  Synthetic
uggaauaacucacagggau

SEQ ID NO: 3922 - RNA, 19 nt, Artificial Sequence
  Synthetic
gagaaggugccuauggaga

SEQ ID NO: 3923 - RNA, 19 nt, Artificial Sequence
  Synthetic
ccucaaaaucucagacuuu

SEQ ID NO: 3924 - RNA, 19 nt, Artificial Sequence
  Synthetic
augaagacaugaagagaaa

SEQ ID NO: 3925 - RNA, 19 nt, Artificial Sequence
  Synthetic
ggacaaaagcugugaauau

SEQ ID NO: 3926 - RNA, 19 nt, Artificial Sequence
  Synthetic
ccauaaagaucaucagcaa

SEQ ID NO: 3927 - RNA, 19 nt, Artificial Sequence
  Synthetic
gguuugaacacgaaagaaa

SEQ ID NO: 3928 - RNA, 19 nt, Artificial Sequence
  Synthetic
guaagaaaguagccauaaa

SEQ ID NO: 3929 - RNA, 19 nt, Artificial Sequence
  Synthetic
ggaauaaacgccugaaaga

SEQ ID NO: 3930 - RNA, 19 nt, Artificial Sequence
  Synthetic
gaggaaaacauguaagaaa

SEQ ID NO: 3931 - RNA, 19 nt, Artificial Sequence
  Synthetic
gcauaggacucaaguguca

SEQ ID NO: 3932 - RNA, 19 nt, Artificial Sequence
  Synthetic
gaacauacagcaagaaaca

SEQ ID NO: 3933 - RNA, 19 nt, Artificial Sequence
  Synthetic
cagaagaagccuuaagaca

SEQ ID NO: 3934 - RNA, 19 nt, Artificial Sequence
  Synthetic
gcugaaaagaacagauaaa

SEQ ID NO: 3935 - RNA, 19 nt, Artificial Sequence
  Synthetic
guuuguaucugcagguuua

SEQ ID NO: 3936 - RNA, 19 nt, Artificial Sequence
  Synthetic
gaugaagacaugaagagaa

SEQ ID NO: 3937 - RNA, 19 nt, Artificial Sequence
  Synthetic
aggcauuaagagaugaaua

SEQ ID NO: 3938 - RNA, 19 nt, Artificial Sequence
  Synthetic
uauuauacaccgugacuua

SEQ ID NO: 3939 - RNA, 19 nt, Artificial Sequence
  Synthetic
gcuuguagggaaaggaaaa

SEQ ID NO: 3940 - RNA, 19 nt, Artificial Sequence
  Synthetic
ugacuuaaagccagagaau

SEQ ID NO: 3941 - RNA, 19 nt, Artificial Sequence
  Synthetic
caauggaaccuuuguaaau

SEQ ID NO: 3942 - RNA, 19 nt, Artificial Sequence
  Synthetic
ggggagagcuguuugacaa

SEQ ID NO: 3943 - RNA, 19 nt, Artificial Sequence
  Synthetic
agacaugaagagaaaguuu

SEQ ID NO: 3944 - RNA, 19 nt, Artificial Sequence
  Synthetic
acagauaaauaccgaacau

SEQ ID NO: 3945 - RNA, 19 nt, Artificial Sequence
  Synthetic
gcaauggaaccuuuguaaa

SEQ ID NO: 3946 - RNA, 19 nt, Artificial Sequence
  Synthetic
cauaaagaucaucagcaaa

SEQ ID NO: 3947 - RNA, 19 nt, Artificial Sequence
  Synthetic
gauaaauaccgaacauaca

SEQ ID NO: 3948 - RNA, 19 nt, Artificial Sequence
  Synthetic
ccgaacauacagcaagaaa

SEQ ID NO: 3949 - RNA, 19 nt, Artificial Sequence
  Synthetic
gucacuaagcagaaauaaa

SEQ ID NO: 3950 - RNA, 19 nt, Artificial Sequence
  Synthetic
aagcaaagagagcgucuaa

SEQ ID NO: 3951 - RNA, 19 nt, Artificial Sequence
  Synthetic
agucacugauguacaauua

SEQ ID NO: 3952 - RNA, 19 nt, Artificial Sequence
  Synthetic
acacugagcuccuuagaga

SEQ ID NO: 3953 - RNA, 19 nt, Artificial Sequence
  Synthetic
acaaagugguggggaauaa

SEQ ID NO: 3954 - RNA, 19 nt, Artificial Sequence
  Synthetic
gaacaagcucagaaagaaa

SEQ ID NO: 3955 - RNA, 19 nt, Artificial Sequence
  Synthetic
gaauuaaguuugccagaua

SEQ ID NO: 3956 - RNA, 19 nt, Artificial Sequence
  Synthetic
cagaugagguccuguaaua

SEQ ID NO: 3957 - RNA, 19 nt, Artificial Sequence
  Synthetic
gcgauuagauacugaagaa

SEQ ID NO: 3958 - RNA, 19 nt, Artificial Sequence
  Synthetic
gcuggaaggccgagagaau

SEQ ID NO: 3959 - RNA, 19 nt, Artificial Sequence
  Synthetic
uaaaggaagugcugagaau

SEQ ID NO: 3960 - RNA, 19 nt, Artificial Sequence
  Synthetic
gacgaaauauagugcaaua

SEQ ID NO: 3961 - RNA, 19 nt, Artificial Sequence
  Synthetic
aaggaagugcugagaauua

SEQ ID NO: 3962 - RNA, 19 nt, Artificial Sequence
  Synthetic
acugaggaauccagaauua

SEQ ID NO: 3963 - RNA, 19 nt, Artificial Sequence
  Synthetic
ccgaacaagcucagaaaga

SEQ ID NO: 3964 - RNA, 19 nt, Artificial Sequence
  Synthetic
gcaagugagcagagaugua

SEQ ID NO: 3965 - RNA, 19 nt, Artificial Sequence
  Synthetic
ggaaaaguaucuaaaggaa

SEQ ID NO: 3966 - RNA, 19 nt, Artificial Sequence
  Synthetic
gcuugaaguuaauagguuu

SEQ ID NO: 3967 - RNA, 19 nt, Artificial Sequence
  Synthetic
gugaguggauguaugauua

SEQ ID NO: 3968 - RNA, 19 nt, Artificial Sequence
  Synthetic
gagcaaacauccggaagua

SEQ ID NO: 3969 - RNA, 19 nt, Artificial Sequence
  Synthetic
cagaaaucgccgagaaaau

SEQ ID NO: 3970 - RNA, 19 nt, Artificial Sequence
  Synthetic
gggcuaagguuuccaguca

SEQ ID NO: 3971 - RNA, 19 nt, Artificial Sequence
  Synthetic
aagaagaaauguugcuuga

SEQ ID NO: 3972 - RNA, 19 nt, Artificial Sequence
  Synthetic
ggauguaugauuauagcua

SEQ ID NO: 3973 - RNA, 19 nt, Artificial Sequence
  Synthetic
cugcagaaaucgccgagaa

SEQ ID NO: 3974 - RNA, 19 nt, Artificial Sequence
  Synthetic
gcugugaaauccauauaua

SEQ ID NO: 3975 - RNA, 19 nt, Artificial Sequence
  Synthetic
aagcaagguuugaugccua

SEQ ID NO: 3976 - RNA, 19 nt, Artificial Sequence
  Synthetic
gcaagaguaagcaguguua

SEQ ID NO: 3977 - RNA, 19 nt, Artificial Sequence
  Synthetic
cgaacaagcucagaaagaa

SEQ ID NO: 3978 - RNA, 19 nt, Artificial Sequence
  Synthetic
guagauggcgacuguguua

SEQ ID NO: 3979 - RNA, 19 nt, Artificial Sequence
  Synthetic
gaauacagcaguuacaauu

SEQ ID NO: 3980 - RNA, 19 nt, Artificial Sequence
  Synthetic
gaugagguccuguaauaaa

SEQ ID NO: 3981 - RNA, 19 nt, Artificial Sequence
  Synthetic
gggauucgacauuggaaau

SEQ ID NO: 3982 - RNA, 19 nt, Artificial Sequence
  Synthetic
ucaugaaugugcuggugaa

SEQ ID NO: 3983 - RNA, 19 nt, Artificial Sequence
  Synthetic
ccagcgaccucgaguccaa

SEQ ID NO: 3984 - RNA, 19 nt, Artificial Sequence
  Synthetic
ccaaagaauuccaggacaa

SEQ ID NO: 3985 - RNA, 19 nt, Artificial Sequence
  Synthetic
cccaagaggagcagagaaa

SEQ ID NO: 3986 - RNA, 19 nt, Artificial Sequence
  Synthetic
agaaauaccuggugcucaa

SEQ ID NO: 3987 - RNA, 19 nt, Artificial Sequence
  Synthetic
ugacguaggcucugagaua

SEQ ID NO: 3988 - RNA, 19 nt, Artificial Sequence
  Synthetic
gcuaagaagcaccagaaua

SEQ ID NO: 3989 - RNA, 19 nt, Artificial Sequence
  Synthetic
cuaagaagcaccagaauau

SEQ ID NO: 3990 - RNA, 19 nt, Artificial Sequence
  Synthetic
ccacgaagauggcgcaauu

SEQ ID NO: 3991 - RNA, 19 nt, Artificial Sequence
  Synthetic
gugaguggguuuaugauua

SEQ ID NO: 3992 - RNA, 19 nt, Artificial Sequence
  Synthetic
agagaaaacuggaagaaga

SEQ ID NO: 3993 - RNA, 19 nt, Artificial Sequence
  Synthetic
gguagaagucagucgguau

SEQ ID NO: 3994 - RNA, 19 nt, Artificial Sequence
  Synthetic
gcaaaggccucaucaagaa

SEQ ID NO: 3995 - RNA, 19 nt, Artificial Sequence
  Synthetic
gggaucaacuccuggaaga

SEQ ID NO: 3996 - RNA, 19 nt, Artificial Sequence
  Synthetic
ggaggaacaacgagcagaa

SEQ ID NO: 3997 - RNA, 19 nt, Artificial Sequence
  Synthetic
cggagagacccgaguauga

SEQ ID NO: 3998 - RNA, 19 nt, Artificial Sequence
  Synthetic
gcugaagguuggagaaaug

SEQ ID NO: 3999 - RNA, 19 nt, Artificial Sequence
  Synthetic
ugauuauacucacgaggaa

SEQ ID NO: 4000 - RNA, 19 nt, Artificial Sequence
  Synthetic
gaucauguaucgccguaaa

SEQ ID NO: 4001 - RNA, 19 nt, Artificial Sequence
  Synthetic
aagaagauuugcugguaga

SEQ ID NO: 4002 - RNA, 19 nt, Artificial Sequence
  Synthetic
ccgaggagcugaggguuua

SEQ ID NO: 4003 - RNA, 19 nt, Artificial Sequence
  Synthetic
agaugaaccugcuggagau

SEQ ID NO: 4004 - RNA, 19 nt, Artificial Sequence
  Synthetic
caaguaacuaugugaguga

SEQ ID NO: 4005 - RNA, 19 nt, Artificial Sequence
  Synthetic
cagacgacguggaguugua

SEQ ID NO: 4006 - RNA, 19 nt, Artificial Sequence
  Synthetic
ccacaaugacauccaggaa

SEQ ID NO: 4007 - RNA, 19 nt, Artificial Sequence
  Synthetic
ggaauggccuuucuacaaa

SEQ ID NO: 4008 - RNA, 19 nt, Artificial Sequence
  Synthetic
ugaaggaugagaugggcaa

SEQ ID NO: 4009 - RNA, 19 nt, Artificial Sequence
  Synthetic
gcaaagcccugcuggacau

SEQ ID NO: 4010 - RNA, 19 nt, Artificial Sequence
  Synthetic
ggagaaggcaucugagucu

SEQ ID NO: 4011 - RNA, 19 nt, Artificial Sequence
  Synthetic
gaacagcaguugcauuuua

SEQ ID NO: 4012 - RNA, 19 nt, Artificial Sequence
  Synthetic
ggaucugggcuauguguau

SEQ ID NO: 4013 - RNA, 19 nt, Artificial Sequence
  Synthetic
gaugauggcuauggaguuu

SEQ ID NO: 4014 - RNA, 19 nt, Artificial Sequence
  Synthetic
ggaaggaagaagaggaaga

SEQ ID NO: 4015 - RNA, 19 nt, Artificial Sequence
  Synthetic
gcuccgaaguggugaucaa

SEQ ID NO: 4016 - RNA, 19 nt, Artificial Sequence
  Synthetic
aagaagaggaagaggacga

SEQ ID NO: 4017 - RNA, 19 nt, Artificial Sequence
  Synthetic
cuggaaggaagaagaggaa

SEQ ID NO: 4018 - RNA, 19 nt, Artificial Sequence
  Synthetic
aggaagaagaggaagagga

SEQ ID NO: 4019 - RNA, 19 nt, Artificial Sequence
  Synthetic
gcaucuaccgggagacaga

SEQ ID NO: 4020 - RNA, 19 nt, Artificial Sequence
  Synthetic
ccgaaguggugaucaagau

SEQ ID NO: 4021 - RNA, 19 nt, Artificial Sequence
  Synthetic
ggacagugcuagcugggca

SEQ ID NO: 4022 - RNA, 19 nt, Artificial Sequence
  Synthetic
acacggagcucaagacagu

SEQ ID NO: 4023 - RNA, 19 nt, Artificial Sequence
  Synthetic
uaagaaagggcgugaucga

SEQ ID NO: 4024 - RNA, 19 nt, Artificial Sequence
  Synthetic
caagaggccgacuaagaaa

SEQ ID NO: 4025 - RNA, 19 nt, Artificial Sequence
  Synthetic
ccacggagcuccccaaaua

SEQ ID NO: 4026 - RNA, 19 nt, Artificial Sequence
  Synthetic
gucaagaggccgacuaaga

SEQ ID NO: 4027 - RNA, 19 nt, Artificial Sequence
  Synthetic
uggacuauguggccagcaa

SEQ ID NO: 4028 - RNA, 19 nt, Artificial Sequence
  Synthetic
ucaagacagucaauaacua

SEQ ID NO: 4029 - RNA, 19 nt, Artificial Sequence
  Synthetic
aggucaacacggagcucaa

SEQ ID NO: 4030 - RNA, 19 nt, Artificial Sequence
  Synthetic
ggaagaagaggaagaggac

SEQ ID NO: 4031 - RNA, 19 nt, Artificial Sequence
  Synthetic
gcuggaaggaagaagagga

SEQ ID NO: 4032 - RNA, 19 nt, Artificial Sequence
  Synthetic
agcucaagacagucaauaa

SEQ ID NO: 4033 - RNA, 19 nt, Artificial Sequence
  Synthetic
cgacuaagaaagggcguga

SEQ ID NO: 4034 - RNA, 19 nt, Artificial Sequence
  Synthetic
aggaagaggacgaaggcuc

SEQ ID NO: 4035 - RNA, 19 nt, Artificial Sequence
  Synthetic
cugcuuugccgcugggaca

SEQ ID NO: 4036 - RNA, 19 nt, Artificial Sequence
  Synthetic
gcaacaaagccuuccggga

SEQ ID NO: 4037 - RNA, 19 nt, Artificial Sequence
  Synthetic
caucaucaccuuuggcaca

SEQ ID NO: 4038 - RNA, 19 nt, Artificial Sequence
  Synthetic
aagagacgcuggcgcaaga

SEQ ID NO: 4039 - RNA, 19 nt, Artificial Sequence
  Synthetic
ucaagaggccgacuaagaa

SEQ ID NO: 4040 - RNA, 19 nt, Artificial Sequence
  Synthetic
gcucaagacagucaauaac

SEQ ID NO: 4041 - RNA, 19 nt, Artificial Sequence
  Synthetic
cuacgcacucugcaacaaa

SEQ ID NO: 4042 - RNA, 19 nt, Artificial Sequence
  Synthetic
gcaaccugcugguacucau

SEQ ID NO: 4043 - RNA, 19 nt, Artificial Sequence
  Synthetic
gcaaugccuccgucaugaa

SEQ ID NO: 4044 - RNA, 19 nt, Artificial Sequence
  Synthetic
ggaaagaaauggaagaaaa

SEQ ID NO: 4045 - RNA, 19 nt, Artificial Sequence
  Synthetic
ggauguugguggaaagaua

SEQ ID NO: 4046 - RNA, 19 nt, Artificial Sequence
  Synthetic
gcacagagauggugaaaau

SEQ ID NO: 4047 - RNA, 19 nt, Artificial Sequence
  Synthetic
gcagaugacguaugggaua

SEQ ID NO: 4048 - RNA, 19 nt, Artificial Sequence
  Synthetic
gcgugaaacuggaauaaau

SEQ ID NO: 4049 - RNA, 19 nt, Artificial Sequence
  Synthetic
caaaugaggaacagggcaa

SEQ ID NO: 4050 - RNA, 19 nt, Artificial Sequence
  Synthetic
gccaagauguuuuguauua

SEQ ID NO: 4051 - RNA, 19 nt, Artificial Sequence
  Synthetic
gggcugaagcagugcacua

SEQ ID NO: 4052 - RNA, 19 nt, Artificial Sequence
  Synthetic
cuaaaagcauggaaagaaa

SEQ ID NO: 4053 - RNA, 19 nt, Artificial Sequence
  Synthetic
ugauauagggucugggauu

SEQ ID NO: 4054 - RNA, 19 nt, Artificial Sequence
  Synthetic
gcacaaaugauagaagaaa

SEQ ID NO: 4055 - RNA, 19 nt, Artificial Sequence
  Synthetic
acuuaaagaaagccagaua

SEQ ID NO: 4056 - RNA, 19 nt, Artificial Sequence
  Synthetic
gugaagagaugucaggaga

SEQ ID NO: 4057 - RNA, 19 nt, Artificial Sequence
  Synthetic
ugccaaagauguugaucaa

SEQ ID NO: 4058 - RNA, 19 nt, Artificial Sequence
  Synthetic
gaagaugccuguuaauuua

SEQ ID NO: 4059 - RNA, 19 nt, Artificial Sequence
  Synthetic
ugugauagcuauaugguuu

SEQ ID NO: 4060 - RNA, 19 nt, Artificial Sequence
  Synthetic
ggcuguaagcagaagauua

SEQ ID NO: 4061 - RNA, 19 nt, Artificial Sequence
  Synthetic
agcuugacuuggagagaua

SEQ ID NO: 4062 - RNA, 19 nt, Artificial Sequence
  Synthetic
ggaguuagaggcugugaua

SEQ ID NO: 4063 - RNA, 19 nt, Artificial Sequence
  Synthetic
aaacauaguucuucaggau

SEQ ID NO: 4064 - RNA, 19 nt, Artificial Sequence
  Synthetic
gaacagggcaauaguauga

SEQ ID NO: 4065 - RNA, 19 nt, Artificial Sequence
  Synthetic
gcagaaagaaauauggcau

SEQ ID NO: 4066 - RNA, 19 nt, Artificial Sequence
  Synthetic
caauuauacagcugcguaa

SEQ ID NO: 4067 - RNA, 19 nt, Artificial Sequence
  Synthetic
cgugaaacuggaauaaaua

SEQ ID NO: 4068 - RNA, 19 nt, Artificial Sequence
  Synthetic
gguggaaagauaauacaua

SEQ ID NO: 4069 - RNA, 19 nt, Artificial Sequence
  Synthetic
gcuguaagcagaagauuau

SEQ ID NO: 4070 - RNA, 19 nt, Artificial Sequence
  Synthetic
uaguagaacccauggaaaa

SEQ ID NO: 4071 - RNA, 19 nt, Artificial Sequence
  Synthetic
cuauuauucaugaggcaaa

SEQ ID NO: 4072 - RNA, 19 nt, Artificial Sequence
  Synthetic
cagagcucuuugagaauaa

SEQ ID NO: 4073 - RNA, 19 nt, Artificial Sequence
  Synthetic
uuggauaccuggaggauca

SEQ ID NO: 4074 - RNA, 19 nt, Artificial Sequence
  Synthetic
caagggaauuugugaacua

SEQ ID NO: 4075 - RNA, 19 nt, Artificial Sequence
  Synthetic
ccucaaugaugcagguuuu

SEQ ID NO: 4076 - RNA, 19 nt, Artificial Sequence
  Synthetic
ccaaaauacaggugaaaau

SEQ ID NO: 4077 - RNA, 19 nt, Artificial Sequence
  Synthetic
cgugggugcuucagaguaa

SEQ ID NO: 4078 - RNA, 19 nt, Artificial Sequence
  Synthetic
cgaaggaaaaugaagaaaa

SEQ ID NO: 4079 - RNA, 19 nt, Artificial Sequence
  Synthetic
ggagaagcugugugaggaa

SEQ ID NO: 4080 - RNA, 19 nt, Artificial Sequence
  Synthetic
cgcauaagcucuuggagau

SEQ ID NO: 4081 - RNA, 19 nt, Artificial Sequence
  Synthetic
gggaauuugugaacuagaa

SEQ ID NO: 4082 - RNA, 19 nt, Artificial Sequence
  Synthetic
uggaauauaacgaggaacu

SEQ ID NO: 4083 - RNA, 19 nt, Artificial Sequence
  Synthetic
ucgcauaagcucuuggaga

SEQ ID NO: 4084 - RNA, 19 nt, Artificial Sequence
  Synthetic
agcccagccucgaaggaaa

SEQ ID NO: 4085 - RNA, 19 nt, Artificial Sequence
  Synthetic
aagacaagauagaacuaga

SEQ ID NO: 4086 - RNA, 19 nt, Artificial Sequence
  Synthetic
ucuuggagauguacaggaa

SEQ ID NO: 4087 - RNA, 19 nt, Artificial Sequence
  Synthetic
aggugugucuggaauauaa

SEQ ID NO: 4088 - RNA, 19 nt, Artificial Sequence
  Synthetic
ggaauuugugaacuagaaa

SEQ ID NO: 4089 - RNA, 19 nt, Artificial Sequence
  Synthetic
agauagaacuagacagcag

SEQ ID NO: 4090 - RNA, 19 nt, Artificial Sequence
  Synthetic
auaacgaggaacuggagaa

SEQ ID NO: 4091 - RNA, 19 nt, Artificial Sequence
  Synthetic
acgaggaacuggagaagcu

SEQ ID NO: 4092 - RNA, 19 nt, Artificial Sequence
  Synthetic
gaacuguaacgcccagaaa

SEQ ID NO: 4093 - RNA, 19 nt, Artificial Sequence
  Synthetic
ugaccaaaauacaggugaa

SEQ ID NO: 4094 - RNA, 19 nt, Artificial Sequence
  Synthetic
cuucaacuaccaagggaau

SEQ ID NO: 4095 - RNA, 19 nt, Artificial Sequence
  Synthetic
ggauaucuguggaccuuau

SEQ ID NO: 4096 - RNA, 19 nt, Artificial Sequence
  Synthetic
gcgucuccuucuacggaua

SEQ ID NO: 4097 - RNA, 19 nt, Artificial Sequence
  Synthetic
auuauggggaggagaguaa

SEQ ID NO: 4098 - RNA, 19 nt, Artificial Sequence
  Synthetic
gaaaaggugugucuggaau

SEQ ID NO: 4099 - RNA, 19 nt, Artificial Sequence
  Synthetic
gaaggaaaaugaagaaaag

SEQ ID NO: 4100 - RNA, 19 nt, Artificial Sequence
  Synthetic
agcccuauguggagagcga

SEQ ID NO: 4101 - RNA, 19 nt, Artificial Sequence
  Synthetic
ggcugcaucuggagagcau

SEQ ID NO: 4102 - RNA, 19 nt, Artificial Sequence
  Synthetic
gaaaagcugucuucaacua

SEQ ID NO: 4103 - RNA, 19 nt, Artificial Sequence
  Synthetic
ucuggaauauaacgaggaa

SEQ ID NO: 4104 - RNA, 19 nt, Artificial Sequence
  Synthetic
gagaagaauucguggguuu

SEQ ID NO: 4105 - RNA, 19 nt, Artificial Sequence
  Synthetic
agauuaaaguguuggacaa

SEQ ID NO: 4106 - RNA, 19 nt, Artificial Sequence
  Synthetic
cguccugggugaugagaaa

SEQ ID NO: 4107 - RNA, 19 nt, Artificial Sequence
  Synthetic
agauuaagcacgugagcaa

SEQ ID NO: 4108 - RNA, 19 nt, Artificial Sequence
  Synthetic
gcaccaugcuggaggaaca

SEQ ID NO: 4109 - RNA, 19 nt, Artificial Sequence
  Synthetic
ggacaaucagauaaagaaa

SEQ ID NO: 4110 - RNA, 19 nt, Artificial Sequence
  Synthetic
acaucaagcugguggauuu

SEQ ID NO: 4111 - RNA, 19 nt, Artificial Sequence
  Synthetic
cuaugaaagugaugaagaa

SEQ ID NO: 4112 - RNA, 19 nt, Artificial Sequence
  Synthetic
ugaaagugaugaagaagaa

SEQ ID NO: 4113 - RNA, 19 nt, Artificial Sequence
  Synthetic
gagaugaaauccagcgcaa

SEQ ID NO: 4114 - RNA, 19 nt, Artificial Sequence
  Synthetic
gcaggugguaagagagaaa

SEQ ID NO: 4115 - RNA, 19 nt, Artificial Sequence
  Synthetic
caggauaaauuaaggguca

SEQ ID NO: 4116 - RNA, 19 nt, Artificial Sequence
  Synthetic
gaaaugagguugaugauga

SEQ ID NO: 4117 - RNA, 19 nt, Artificial Sequence
  Synthetic
ucaaugaccuggagaagaa

SEQ ID NO: 4118 - RNA, 19 nt, Artificial Sequence
  Synthetic
caucaaaagcaaagagcua

SEQ ID NO: 4119 - RNA, 19 nt, Artificial Sequence
  Synthetic
aagacuagcuccauggaaa

SEQ ID NO: 4120 - RNA, 19 nt, Artificial Sequence
  Synthetic
ggaccagucuucaguauaa

SEQ ID NO: 4121 - RNA, 19 nt, Artificial Sequence
  Synthetic
aggaacaggucauggauuu

SEQ ID NO: 4122 - RNA, 19 nt, Artificial Sequence
  Synthetic
agaaggagguggagcugaa

SEQ ID NO: 4123 - RNA, 19 nt, Artificial Sequence
  Synthetic
ggaaagagauagagaccuc

SEQ ID NO: 4124 - RNA, 19 nt, Artificial Sequence
  Synthetic
uaacaaacgaggacagcaa

SEQ ID NO: 4125 - RNA, 19 nt, Artificial Sequence
  Synthetic
cugaggagcucgaagagaa

SEQ ID NO: 4126 - RNA, 19 nt, Artificial Sequence
  Synthetic
gaucaaaaguccucauuua

SEQ ID NO: 4127 - RNA, 19 nt, Artificial Sequence
  Synthetic
cauaaacuguugaaggcua

SEQ ID NO: 4128 - RNA, 19 nt, Artificial Sequence
  Synthetic
augcgaaacuggagaagau

SEQ ID NO: 4129 - RNA, 19 nt, Artificial Sequence
  Synthetic
augcuaaacugcuuggaaa

SEQ ID NO: 4130 - RNA, 19 nt, Artificial Sequence
  Synthetic
agaaagaccuggcugacaa

SEQ ID NO: 4131 - RNA, 19 nt, Artificial Sequence
  Synthetic
gaacagaaggcgaugauca

SEQ ID NO: 4132 - RNA, 19 nt, Artificial Sequence
  Synthetic
ggaagagaccacagcagaa

SEQ ID NO: 4133 - RNA, 19 nt, Artificial Sequence
  Synthetic
ccucauaccaggauaaauu

SEQ ID NO: 4134 - RNA, 19 nt, Artificial Sequence
  Synthetic
ccucaugccugcccagaaa

SEQ ID NO: 4135 - RNA, 19 nt, Artificial Sequence
  Synthetic
gggcaggugugcauaucaa

SEQ ID NO: 4136 - RNA, 19 nt, Artificial Sequence
  Synthetic
cugcugaugcugaaauaaa

SEQ ID NO: 4137 - RNA, 19 nt, Artificial Sequence
  Synthetic
agguggagcuggugcagau

SEQ ID NO: 4138 - RNA, 19 nt, Artificial Sequence
  Synthetic
acaacaaccacauggccaa

SEQ ID NO: 4139 - RNA, 19 nt, Artificial Sequence
  Synthetic
acgaaguguucaaggaucu

SEQ ID NO: 4140 - RNA, 19 nt, Artificial Sequence
  Synthetic
gcgaugagcacaagaccga

SEQ ID NO: 4141 - RNA, 19 nt, Artificial Sequence
  Synthetic
ugggcaagcaugagaaguu

SEQ ID NO: 4142 - RNA, 19 nt, Artificial Sequence
  Synthetic
agauacugcugaugcugaa

SEQ ID NO: 4143 - RNA, 19 nt, Artificial Sequence
  Synthetic
ccuacgaaguguucaagga

SEQ ID NO: 4144 - RNA, 19 nt, Artificial Sequence
  Synthetic
gagugaagcugcucaucga

SEQ ID NO: 4145 - RNA, 19 nt, Artificial Sequence
  Synthetic
guaucuggcacaaugacaa

SEQ ID NO: 4146 - RNA, 19 nt, Artificial Sequence
  Synthetic
ucucagagguggagcuggu

SEQ ID NO: 4147 - RNA, 19 nt, Artificial Sequence
  Synthetic
uggcuaagauacugcugau

SEQ ID NO: 4148 - RNA, 19 nt, Artificial Sequence
  Synthetic
gaaacucucuucaagucua

SEQ ID NO: 4149 - RNA, 19 nt, Artificial Sequence
  Synthetic
acaaugacaauaagaccuu

SEQ ID NO: 4150 - RNA, 19 nt, Artificial Sequence
  Synthetic
ggccucacccagauugaaa

SEQ ID NO: 4151 - RNA, 19 nt, Artificial Sequence
  Synthetic
cuacgaaguguucaaggau

SEQ ID NO: 4152 - RNA, 19 nt, Artificial Sequence
  Synthetic
gcuacaagcccagcgauga

SEQ ID NO: 4153 - RNA, 19 nt, Artificial Sequence
  Synthetic
aaacucucuucaagucuaa

SEQ ID NO: 4154 - RNA, 19 nt, Artificial Sequence
  Synthetic
cuaagauacugcugaugcu

SEQ ID NO: 4155 - RNA, 19 nt, Artificial Sequence
  Synthetic
ccugcugcuuccuaacuua

SEQ ID NO: 4156 - RNA, 19 nt, Artificial Sequence
  Synthetic
uacugcugaugcugaaaua

SEQ ID NO: 4157 - RNA, 19 nt, Artificial Sequence
  Synthetic
gggcaagcaugagaaguuc

SEQ ID NO: 4158 - RNA, 19 nt, Artificial Sequence
  Synthetic
ucuggcacaaugacaauaa

SEQ ID NO: 4159 - RNA, 19 nt, Artificial Sequence
  Synthetic
cgucacccuugguagaguu

SEQ ID NO: 4160 - RNA, 19 nt, Artificial Sequence
  Synthetic
ucuaaggacuaugaguuca

SEQ ID NO: 4161 - RNA, 19 nt, Artificial Sequence
  Synthetic
ucacccagauugaaacucu

SEQ ID NO: 4162 - RNA, 19 nt, Artificial Sequence
  Synthetic
gcacaagaccgaccucaac

SEQ ID NO: 4163 - RNA, 19 nt, Artificial Sequence
  Synthetic
ugaagcugcucaucgagau

SEQ ID NO: 4164 - RNA, 19 nt, Artificial Sequence
  Synthetic
ccucaaaggagaauuuaaa

SEQ ID NO: 4165 - RNA, 19 nt, Artificial Sequence
  Synthetic
cugaagacaucaagaagau

SEQ ID NO: 4166 - RNA, 19 nt, Artificial Sequence
  Synthetic
gcgcugaagggcaaggaaa

SEQ ID NO: 4167 - RNA, 19 nt, Artificial Sequence
  Synthetic
cccgagaacagcagaaaua

SEQ ID NO: 4168 - RNA, 19 nt, Artificial Sequence
  Synthetic
uugcaaagcucuaacugaa

SEQ ID NO: 4169 - RNA, 19 nt, Artificial Sequence
  Synthetic
gagaaggacccgaauaaaa

SEQ ID NO: 4170 - RNA, 19 nt, Artificial Sequence
  Synthetic
gggcaaaggagaugugaug

SEQ ID NO: 4171 - RNA, 19 nt, Artificial Sequence
  Synthetic
ggcgagagcgaaagaggaa

SEQ ID NO: 4172 - RNA, 19 nt, Artificial Sequence
  Synthetic
aaggaaagcagcauagaga

SEQ ID NO: 4173 - RNA, 19 nt, Artificial Sequence
  Synthetic
cuggaagacauuuaugaaa

SEQ ID NO: 4174 - RNA, 19 nt, Artificial Sequence
  Synthetic
cauaggaucuggugcugua

SEQ ID NO: 4175 - RNA, 19 nt, Artificial Sequence
  Synthetic
ccaaaauaaugaucaguga

SEQ ID NO: 4176 - RNA, 19 nt, Artificial Sequence
  Synthetic
acgcaaagcgauaaauaaa

SEQ ID NO: 4177 - RNA, 19 nt, Artificial Sequence
  Synthetic
ugguggaaauggagaagaa

SEQ ID NO: 4178 - RNA, 19 nt, Artificial Sequence
  Synthetic
gcguagggcugcagaagau

SEQ ID NO: 4179 - RNA, 19 nt, Artificial Sequence
  Synthetic
cugaagagcaugacggaga

SEQ ID NO: 4180 - RNA, 19 nt, Artificial Sequence
  Synthetic
gggugaacgaggaggauca

SEQ ID NO: 4181 - RNA, 19 nt, Artificial Sequence
  Synthetic
gauucuggccaaugaaaua

SEQ ID NO: 4182 - RNA, 19 nt, Artificial Sequence
  Synthetic
uggagaagaaguuggagaa

SEQ ID NO: 4183 - RNA, 19 nt, Artificial Sequence
  Synthetic
ggagaagaaguuggagaaa

SEQ ID NO: 4184 - RNA, 19 nt, Artificial Sequence
  Synthetic
gcaacaugaaggagguuuu

SEQ ID NO: 4185 - RNA, 19 nt, Artificial Sequence
  Synthetic
cuacgaaguuuucaaggaa

SEQ ID NO: 4186 - RNA, 19 nt, Artificial Sequence
  Synthetic
ccaccaugccauucgguaa

SEQ ID NO: 4187 - RNA, 19 nt, Artificial Sequence
  Synthetic
acaagaagcugcgggacaa

SEQ ID NO: 4188 - RNA, 19 nt, Artificial Sequence
  Synthetic
uggaaauggagaagaaguu

SEQ ID NO: 4189 - RNA, 19 nt, Artificial Sequence
  Synthetic
gagacgaccuggacccuaa

SEQ ID NO: 4190 - RNA, 19 nt, Artificial Sequence
  Synthetic
ugcagaagauugaggagau

SEQ ID NO: 4191 - RNA, 19 nt, Artificial Sequence
  Synthetic
cgggcgaguucaaagggaa

SEQ ID NO: 4192 - RNA, 19 nt, Artificial Sequence
  Synthetic
ccacgcaaagcgauaaaua

SEQ ID NO: 4193 - RNA, 19 nt, Artificial Sequence
  Synthetic
gcuacaaacccacugacaa

SEQ ID NO: 4194 - RNA, 19 nt, Artificial Sequence
  Synthetic
agaagaaguuggagaaagg

SEQ ID NO: 4195 - RNA, 19 nt, Artificial Sequence
  Synthetic
cugacaagcacaagacuga

SEQ ID NO: 4196 - RNA, 19 nt, Artificial Sequence
  Synthetic
gugugaagcucauggugga

SEQ ID NO: 4197 - RNA, 19 nt, Artificial Sequence
  Synthetic
aagcauugguggccuuaaa

SEQ ID NO: 4198 - RNA, 19 nt, Artificial Sequence
  Synthetic
auuacaagccugaggagga

SEQ ID NO: 4199 - RNA, 19 nt, Artificial Sequence
  Synthetic
ccucaaggguggagacgac

SEQ ID NO: 4200 - RNA, 19 nt, Artificial Sequence
  Synthetic
cggagaaggagcagcagca

SEQ ID NO: 4201 - RNA, 19 nt, Artificial Sequence
  Synthetic
ucucagaguuccaguuuca

SEQ ID NO: 4202 - RNA, 19 nt, Artificial Sequence
  Synthetic
gcaucuggcacaaugacaa

SEQ ID NO: 4203 - RNA, 19 nt, Artificial Sequence
  Synthetic
ugaagagcaugacggagaa

SEQ ID NO: 4204 - RNA, 19 nt, Artificial Sequence
  Synthetic
uacaagaagcugcgggaca

SEQ ID NO: 4205 - RNA, 19 nt, Artificial Sequence
  Synthetic
aguucaaagggaaguacua

SEQ ID NO: 4206 - RNA, 19 nt, Artificial Sequence
  Synthetic
ggaaugagcguuugggaua

SEQ ID NO: 4207 - RNA, 19 nt, Artificial Sequence
  Synthetic
ucaaagagguggagagacu

SEQ ID NO: 4208 - RNA, 19 nt, Artificial Sequence
  Synthetic
agagaguguuugaaagauu

SEQ ID NO: 4209 - RNA, 19 nt, Artificial Sequence
  Synthetic
gaagagaguguuugaaaga

SEQ ID NO: 4210 - RNA, 19 nt, Artificial Sequence
  Synthetic
gccagaugcucguggaauu

SEQ ID NO: 4211 - RNA, 19 nt, Artificial Sequence
  Synthetic
gggcaggagugcacaucaa

SEQ ID NO: 4212 - RNA, 19 nt, Artificial Sequence
  Synthetic
gggugaaugaggaggauca

SEQ ID NO: 4213 - RNA, 19 nt, Artificial Sequence
  Synthetic
ggaucuagaugccaguaaa

SEQ ID NO: 4214 - RNA, 19 nt, Artificial Sequence
  Synthetic
ggacguuacuauaggcuca

SEQ ID NO: 4215 - RNA, 19 nt, Artificial Sequence
  Synthetic
ucccaaagauccuggagaa

SEQ ID NO: 4216 - RNA, 19 nt, Artificial Sequence
  Synthetic
ggagagacuuauccaagaa

SEQ ID NO: 4217 - RNA, 19 nt, Artificial Sequence
  Synthetic
gcuacuuugaugagaggua

SEQ ID NO: 4218 - RNA, 19 nt, Artificial Sequence
  Synthetic
gguaacaugaagagagugu

SEQ ID NO: 4219 - RNA, 19 nt, Artificial Sequence
  Synthetic
augaagagaguguuugaaa

SEQ ID NO: 4220 - RNA, 19 nt, Artificial Sequence
  Synthetic
guauuguccucuagaguca

SEQ ID NO: 4221 - RNA, 19 nt, Artificial Sequence
  Synthetic
ucaucaagacugugggcau

SEQ ID NO: 4222 - RNA, 19 nt, Artificial Sequence
  Synthetic
cuggagaugaggagaccua

SEQ ID NO: 4223 - RNA, 19 nt, Artificial Sequence
  Synthetic
ggucaucgauggaguaaac

SEQ ID NO: 4224 - RNA, 19 nt, Artificial Sequence
  Synthetic
acaacaaugagaagagcuu

SEQ ID NO: 4225 - RNA, 19 nt, Artificial Sequence
  Synthetic
gugguaacaugaagagagu

SEQ ID NO: 4226 - RNA, 19 nt, Artificial Sequence
  Synthetic
caaagauccuggagaaccu

SEQ ID NO: 4227 - RNA, 19 nt, Artificial Sequence
  Synthetic
ggagaagggugguaacaug

SEQ ID NO: 4228 - RNA, 19 nt, Artificial Sequence
  Synthetic
gauccaagagcgacacaau

SEQ ID NO: 4229 - RNA, 19 nt, Artificial Sequence
  Synthetic
gugagaugacagaggcuga

SEQ ID NO: 4230 - RNA, 19 nt, Artificial Sequence
  Synthetic
gggcaugguggcuggagau

SEQ ID NO: 4231 - RNA, 19 nt, Artificial Sequence
  Synthetic
aaagagguggagagacuua

SEQ ID NO: 4232 - RNA, 19 nt, Artificial Sequence
  Synthetic
ggaguaaacuauuugauug

SEQ ID NO: 4233 - RNA, 19 nt, Artificial Sequence
  Synthetic
agguggagcuggugcaacu

SEQ ID NO: 4234 - RNA, 19 nt, Artificial Sequence
  Synthetic
ccuaugagguauuugcuga

SEQ ID NO: 4235 - RNA, 19 nt, Artificial Sequence
  Synthetic
ggauaaaugaggaggauca

SEQ ID NO: 4236 - RNA, 19 nt, Artificial Sequence
  Synthetic
gcuucaagaucaaaggaaa

SEQ ID NO: 4237 - RNA, 19 nt, Artificial Sequence
  Synthetic
ggagagaggccaagauauu

SEQ ID NO: 4238 - RNA, 19 nt, Artificial Sequence
  Synthetic
ggaaugagcgccuaggaua

SEQ ID NO: 4239 - RNA, 19 nt, Artificial Sequence
  Synthetic
ucauaaagacugugggcau

SEQ ID NO: 4240 - RNA, 19 nt, Artificial Sequence
  Synthetic
gaucagagguugagcuugu

SEQ ID NO: 4241 - RNA, 19 nt, Artificial Sequence
  Synthetic
agauagaauuggucgauca

SEQ ID NO: 4242 - RNA, 19 nt, Artificial Sequence
  Synthetic
aggguaaucucaauggaaa

SEQ ID NO: 4243 - RNA, 19 nt, Artificial Sequence
  Synthetic
gaggaucacaccaggguaa

SEQ ID NO: 4244 - RNA, 19 nt, Artificial Sequence
  Synthetic
gguugagcuuguucagaua

SEQ ID NO: 4245 - RNA, 19 nt, Artificial Sequence
  Synthetic
cugccuaucuuuacaauaa

SEQ ID NO: 4246 - RNA, 19 nt, Artificial Sequence
  Synthetic
gaaccuuggaacaggacua

SEQ ID NO: 4247 - RNA, 19 nt, Artificial Sequence
  Synthetic
ggguaaucucaauggaaaa

SEQ ID NO: 4248 - RNA, 19 nt, Artificial Sequence
  Synthetic
gcgauucugucguggacua

SEQ ID NO: 4249 - RNA, 19 nt, Artificial Sequence
  Synthetic
gaggaaggauggccaguau

SEQ ID NO: 4250 - RNA, 19 nt, Artificial Sequence
  Synthetic
gaagggagguagagaacgu

SEQ ID NO: 4251 - RNA, 19 nt, Artificial Sequence
  Synthetic
gaaacgaguauuugagcga

SEQ ID NO: 4252 - RNA, 19 nt, Artificial Sequence
  Synthetic
caacagacauaaaucucua

SEQ ID NO: 4253 - RNA, 19 nt, Artificial Sequence
  Synthetic
gcugggaguucauguggaa

SEQ ID NO: 4254 - RNA, 19 nt, Artificial Sequence
  Synthetic
ggcaauaugaaacgaguau

SEQ ID NO: 4255 - RNA, 19 nt, Artificial Sequence
  Synthetic
agucaucgauggagucaau

SEQ ID NO: 4256 - RNA, 19 nt, Artificial Sequence
  Synthetic
agguagagaacguggccau

SEQ ID NO: 4257 - RNA, 19 nt, Artificial Sequence
  Synthetic
ggcaguucgacgagcauua

SEQ ID NO: 4258 - RNA, 19 nt, Artificial Sequence
  Synthetic
gcgaagggagguagagaac

SEQ ID NO: 4259 - RNA, 19 nt, Artificial Sequence
  Synthetic
acauaaaucucuacucuga

SEQ ID NO: 4260 - RNA, 19 nt, Artificial Sequence
  Synthetic
aaaagaaguagaacgguua

SEQ ID NO: 4261 - RNA, 19 nt, Artificial Sequence
  Synthetic
agagaggccaagauauuaa

SEQ ID NO: 4262 - RNA, 19 nt, Artificial Sequence
  Synthetic
ccuaugagguguuugcuga

SEQ ID NO: 4263 - RNA, 19 nt, Artificial Sequence
  Synthetic
caacauagauagaauuggu

SEQ ID NO: 4264 - RNA, 19 nt, Artificial Sequence
  Synthetic
cagcaaggacccacgcuuu

SEQ ID NO: 4265 - RNA, 19 nt, Artificial Sequence
  Synthetic
ggaggaagcaucugaguuu

SEQ ID NO: 4266 - RNA, 19 nt, Artificial Sequence
  Synthetic
ccaagaaaccaaagaaaug

SEQ ID NO: 4267 - RNA, 19 nt, Artificial Sequence
  Synthetic
caucugaguuugagaccau

SEQ ID NO: 4268 - RNA, 19 nt, Artificial Sequence
  Synthetic
cgacgaggaguuugaguau

SEQ ID NO: 4269 - RNA, 19 nt, Artificial Sequence
  Synthetic
ccuaacaucuuucugauaa

SEQ ID NO: 4270 - RNA, 19 nt, Artificial Sequence
  Synthetic
cccaagaaaccaaagaaau

SEQ ID NO: 4271 - RNA, 19 nt, Artificial Sequence
  Synthetic
caaauuuacuauucggaca

SEQ ID NO: 4272 - RNA, 19 nt, Artificial Sequence
  Synthetic
gaaucugaauggaggaauc

SEQ ID NO: 4273 - RNA, 19 nt, Artificial Sequence
  Synthetic
uagccaagcuggucccuaa

SEQ ID NO: 4274 - RNA, 19 nt, Artificial Sequence
  Synthetic
acccaagaaaccaaagaaa

SEQ ID NO: 4275 - RNA, 19 nt, Artificial Sequence
  Synthetic
ggauuuauguuucagugua

SEQ ID NO: 4276 - RNA, 19 nt, Artificial Sequence
  Synthetic
cggacaaauacgacgacga

SEQ ID NO: 4277 - RNA, 19 nt, Artificial Sequence
  Synthetic
acaaauacgacgacgagga

SEQ ID NO: 4278 - RNA, 19 nt, Artificial Sequence
  Synthetic
caagaaaucuguucauguu

SEQ ID NO: 4279 - RNA, 19 nt, Artificial Sequence
  Synthetic
acgacgaggaguuugagua

SEQ ID NO: 4280 - RNA, 19 nt, Artificial Sequence
  Synthetic
aauacgacgacgaggaguu

SEQ ID NO: 4281 - RNA, 19 nt, Artificial Sequence
  Synthetic
cugcuuugcuucuugagua

SEQ ID NO: 4282 - RNA, 19 nt, Artificial Sequence
  Synthetic
uguggugacuugcggauuu

SEQ ID NO: 4283 - RNA, 19 nt, Artificial Sequence
  Synthetic
gaucaugucgcacaaacaa

SEQ ID NO: 4284 - RNA, 19 nt, Artificial Sequence
  Synthetic
gauuuauguuucaguguac

SEQ ID NO: 4285 - RNA, 19 nt, Artificial Sequence
  Synthetic
ccacuacccaagaaaccaa

SEQ ID NO: 4286 - RNA, 19 nt, Artificial Sequence
  Synthetic
gcugguaacugcuuugcuu

SEQ ID NO: 4287 - RNA, 19 nt, Artificial Sequence
  Synthetic
cgcacaaacaaauuuacua

SEQ ID NO: 4288 - RNA, 19 nt, Artificial Sequence
  Synthetic
caagaaaccaaagaaauga

SEQ ID NO: 4289 - RNA, 19 nt, Artificial Sequence
  Synthetic
caauacacuguuugaaugu

SEQ ID NO: 4290 - RNA, 19 nt, Artificial Sequence
  Synthetic
ucaagaaaucuguucaugu

SEQ ID NO: 4291 - RNA, 19 nt, Artificial Sequence
  Synthetic
guggugacuugcggauuua

SEQ ID NO: 4292 - RNA, 19 nt, Artificial Sequence
  Synthetic
gaguuugaguaucgacaug

SEQ ID NO: 4293 - RNA, 19 nt, Artificial Sequence
  Synthetic
ggaggaaucuuggcguuca

SEQ ID NO: 4294 - RNA, 19 nt, Artificial Sequence
  Synthetic
acagggaucauguaaacuu

SEQ ID NO: 4295 - RNA, 19 nt, Artificial Sequence
  Synthetic
gcaacagagcucaguuaaa

SEQ ID NO: 4296 - RNA, 19 nt, Artificial Sequence
  Synthetic
ucagugaauacuugagaaa

SEQ ID NO: 4297 - RNA, 19 nt, Artificial Sequence
  Synthetic
ccagagaacuuuccaaaca

SEQ ID NO: 4298 - RNA, 19 nt, Artificial Sequence
  Synthetic
agugaauacuugagaaaug

SEQ ID NO: 4299 - RNA, 19 nt, Artificial Sequence
  Synthetic
cuguuugaguuuacugaaa

SEQ ID NO: 4300 - RNA, 19 nt, Artificial Sequence
  Synthetic
cagcaacagagcucaguua

SEQ ID NO: 4301 - RNA, 19 nt, Artificial Sequence
  Synthetic
cagagaacuuuccaaacaa

SEQ ID NO: 4302 - RNA, 19 nt, Artificial Sequence
  Synthetic
gaagaggaguggaggagac

SEQ ID NO: 4303 - RNA, 19 nt, Artificial Sequence
  Synthetic
ccacauauucuucucuuua

SEQ ID NO: 4304 - RNA, 19 nt, Artificial Sequence
  Synthetic
caacagagcucaguuaaau

SEQ ID NO: 4305 - RNA, 19 nt, Artificial Sequence
  Synthetic
cauccauaccugugcauga

SEQ ID NO: 4306 - RNA, 19 nt, Artificial Sequence
  Synthetic
ccacgaggauggcccacaa

SEQ ID NO: 4307 - RNA, 19 nt, Artificial Sequence
  Synthetic
guaccggcauguuauguua

SEQ ID NO: 4308 - RNA, 19 nt, Artificial Sequence
  Synthetic
ucgacgaacacuacgagua

SEQ ID NO: 4309 - RNA, 19 nt, Artificial Sequence
  Synthetic
agaucuacuacucggacaa

SEQ ID NO: 4310 - RNA, 19 nt, Artificial Sequence
  Synthetic
guacaaaucuuucauccau

SEQ ID NO: 4311 - RNA, 19 nt, Artificial Sequence
  Synthetic
cggacaaguacuucgacga

SEQ ID NO: 4312 - RNA, 19 nt, Artificial Sequence
  Synthetic
cuugagaaauguacaaauc

SEQ ID NO: 4313 - RNA, 19 nt, Artificial Sequence
  Synthetic
uauguuacccagagaacuu

SEQ ID NO: 4314 - RNA, 19 nt, Artificial Sequence
  Synthetic
auaagguaguauucaguga

SEQ ID NO: 4315 - RNA, 19 nt, Artificial Sequence
  Synthetic
cgacgaacacuacgaguac

SEQ ID NO: 4316 - RNA, 19 nt, Artificial Sequence
  Synthetic
gugcaugagcuguauucuu

SEQ ID NO: 4317 - RNA, 19 nt, Artificial Sequence
  Synthetic
gaggaguggaggagacuug

SEQ ID NO: 4318 - RNA, 19 nt, Artificial Sequence
  Synthetic
uagacgaccucuuccaaaa

SEQ ID NO: 4319 - RNA, 19 nt, Artificial Sequence
  Synthetic
cccacaagcagaucuacua

SEQ ID NO: 4320 - RNA, 19 nt, Artificial Sequence
  Synthetic
agagcucaguuaaaugcaa

SEQ ID NO: 4321 - RNA, 19 nt, Artificial Sequence
  Synthetic
gugaauacuugagaaaugu

SEQ ID NO: 4322 - RNA, 19 nt, Artificial Sequence
  Synthetic
ggauggcccacaagcagau

SEQ ID NO: 4323 - RNA, 19 nt, Artificial Sequence
  Synthetic
uuaagugccuguuugaguu

SEQ ID NO: 4324 - RNA, 19 nt, Artificial Sequence
  Synthetic
uacgaguaccggcauguua

SEQ ID NO: 4325 - RNA, 19 nt, Artificial Sequence
  Synthetic
gguagaaguggaagaagua

SEQ ID NO: 4326 - RNA, 19 nt, Artificial Sequence
  Synthetic
ucauaaagcgggagguaga

SEQ ID NO: 4327 - RNA, 19 nt, Artificial Sequence
  Synthetic
gugaaggagcuuuuggaaa

SEQ ID NO: 4328 - RNA, 19 nt, Artificial Sequence
  Synthetic
cguacuaagugcaagauau

SEQ ID NO: 4329 - RNA, 19 nt, Artificial Sequence
  Synthetic
gaagagucaccgaaggaaa

SEQ ID NO: 4330 - RNA, 19 nt, Artificial Sequence
  Synthetic
ggucuauaaaugagaaaga

SEQ ID NO: 4331 - RNA, 19 nt, Artificial Sequence
  Synthetic
ggaguaugauccagccaaa

SEQ ID NO: 4332 - RNA, 19 nt, Artificial Sequence
  Synthetic
caacauaugaugacgaaca

SEQ ID NO: 4333 - RNA, 19 nt, Artificial Sequence
  Synthetic
agguagacauguagcagua

SEQ ID NO: 4334 - RNA, 19 nt, Artificial Sequence
  Synthetic
uggaaugguuugagcauca

SEQ ID NO: 4335 - RNA, 19 nt, Artificial Sequence
  Synthetic
ggauugggauuauggaaaa

SEQ ID NO: 4336 - RNA, 19 nt, Artificial Sequence
  Synthetic
gcguauaaucccaaaauaa

SEQ ID NO: 4337 - RNA, 19 nt, Artificial Sequence
  Synthetic
cagagaagccuuaaagcau

SEQ ID NO: 4338 - RNA, 19 nt, Artificial Sequence
  Synthetic
aguaauaaguugacucaca

SEQ ID NO: 4339 - RNA, 19 nt, Artificial Sequence
  Synthetic
gagaacaagcgcugcaaau

SEQ ID NO: 4340 - RNA, 19 nt, Artificial Sequence
  Synthetic
ugguagaaguggaagaagu

SEQ ID NO: 4341 - RNA, 19 nt, Artificial Sequence
  Synthetic
uagcuaagguaaugaacau

SEQ ID NO: 4342 - RNA, 19 nt, Artificial Sequence
  Synthetic
gcaaauacaaucacucuaa

SEQ ID NO: 4343 - RNA, 19 nt, Artificial Sequence
  Synthetic
ggaaaggauucuuggaccu

SEQ ID NO: 4344 - RNA, 19 nt, Artificial Sequence
  Synthetic
aggauugggauuauggaaa

SEQ ID NO: 4345 - RNA, 19 nt, Artificial Sequence
  Synthetic
ccaggaguguagaggauga

SEQ ID NO: 4346 - RNA, 19 nt, Artificial Sequence
  Synthetic
gagcagcagcagucauaaa

SEQ ID NO: 4347 - RNA, 19 nt, Artificial Sequence
  Synthetic
gaucauaaagcgggaggua

SEQ ID NO: 4348 - RNA, 19 nt, Artificial Sequence
  Synthetic
uagcaaugauggaaaggau

SEQ ID NO: 4349 - RNA, 19 nt, Artificial Sequence
  Synthetic
agacuuugguagugcaaca

SEQ ID NO: 4350 - RNA, 19 nt, Artificial Sequence
  Synthetic
cugucagaguggagacgua

SEQ ID NO: 4351 - RNA, 19 nt, Artificial Sequence
  Synthetic
uguugauacuuuaggugaa

SEQ ID NO: 4352 - RNA, 19 nt, Artificial Sequence
  Synthetic
aguaaggagcauuuagcaa

SEQ ID NO: 4353 - RNA, 19 nt, Artificial Sequence
  Synthetic
acauugaugaguacagaaa

SEQ ID NO: 4354 - RNA, 19 nt, Artificial Sequence
  Synthetic
gggaagagucaccgaagga

SEQ ID NO: 4355 - RNA, 19 nt, Artificial Sequence
  Synthetic
guacagucuuugugaaaua

SEQ ID NO: 4356 - RNA, 19 nt, Artificial Sequence
  Synthetic
agacaagaaagcagaaaua

SEQ ID NO: 4357 - RNA, 19 nt, Artificial Sequence
  Synthetic
ccuacaaccuagagaagaa

SEQ ID NO: 4358 - RNA, 19 nt, Artificial Sequence
  Synthetic
gaucaacgugcuagagaaa

SEQ ID NO: 4359 - RNA, 19 nt, Artificial Sequence
  Synthetic
agaaagacccugacaacaa

SEQ ID NO: 4360 - RNA, 19 nt, Artificial Sequence
  Synthetic
uuaagaauguggagaagua

SEQ ID NO: 4361 - RNA, 19 nt, Artificial Sequence
  Synthetic
gauaacaagcugacacaua

SEQ ID NO: 4362 - RNA, 19 nt, Artificial Sequence
  Synthetic
ccugugaauaugugaaaua

SEQ ID NO: 4363 - RNA, 19 nt, Artificial Sequence
  Synthetic
ugaaagaacuuguaccuau

SEQ ID NO: 4364 - RNA, 19 nt, Artificial Sequence
  Synthetic
cuacaagagcgauaugaaa

SEQ ID NO: 4365 - RNA, 19 nt, Artificial Sequence
  Synthetic
aagcauaagcgacgaagaa

SEQ ID NO: 4366 - RNA, 19 nt, Artificial Sequence
  Synthetic
uugaauacuaugugggauu

SEQ ID NO: 4367 - RNA, 19 nt, Artificial Sequence
  Synthetic
cgagaugagcgcaguguga

SEQ ID NO: 4368 - RNA, 19 nt, Artificial Sequence
  Synthetic
gcauaagcgacgaagaagu

SEQ ID NO: 4369 - RNA, 19 nt, Artificial Sequence
  Synthetic
agaucaacgugcuagagaa

SEQ ID NO: 4370 - RNA, 19 nt, Artificial Sequence
  Synthetic
gcuacagacgcaacgauua

SEQ ID NO: 4371 - RNA, 19 nt, Artificial Sequence
  Synthetic
cgaaagacaagaaagcaga

SEQ ID NO: 4372 - RNA, 19 nt, Artificial Sequence
  Synthetic
ccugaagaucauuaagaau

SEQ ID NO: 4373 - RNA, 19 nt, Artificial Sequence
  Synthetic
gcuacaagagcgauaugaa

SEQ ID NO: 4374 - RNA, 19 nt, Artificial Sequence
  Synthetic
gcaucaucuuugaauacua

SEQ ID NO: 4375 - RNA, 19 nt, Artificial Sequence
  Synthetic
ucaaguuccuccaugauaa

SEQ ID NO: 4376 - RNA, 19 nt, Artificial Sequence
  Synthetic
ugaaagcaugcuagaguau

SEQ ID NO: 4377 - RNA, 19 nt, Artificial Sequence
  Synthetic
auacagaccucaagccuga

SEQ ID NO: 4378 - RNA, 19 nt, Artificial Sequence
  Synthetic
ggaauuuuguacagucuuu

SEQ ID NO: 4379 - RNA, 19 nt, Artificial Sequence
  Synthetic
gcugcaucaucuuugaaua

SEQ ID NO: 4380 - RNA, 19 nt, Artificial Sequence
  Synthetic
agaagucgcuccuggucaa

SEQ ID NO: 4381 - RNA, 19 nt, Artificial Sequence
  Synthetic
cuacagacgcaacgauuau

SEQ ID NO: 4382 - RNA, 19 nt, Artificial Sequence
  Synthetic
agaauguggagaaguacaa

SEQ ID NO: 4383 - RNA, 19 nt, Artificial Sequence
  Synthetic
ucaacgugcuagagaaaau

SEQ ID NO: 4384 - RNA, 19 nt, Artificial Sequence
  Synthetic
ggaguuaccgugaacacua

SEQ ID NO: 4385 - RNA, 19 nt, Artificial Sequence
  Synthetic
aggagaagucagugaagaa

SEQ ID NO: 4386 - RNA, 19 nt, Artificial Sequence
  Synthetic
ccuuugagcuccugggcaa

SEQ ID NO: 4387 - RNA, 19 nt, Artificial Sequence
  Synthetic
agaauaacuuccagccuua

SEQ ID NO: 4388 - RNA, 19 nt, Artificial Sequence
  Synthetic
guaccaggaagcagaaaua

SEQ ID NO: 4389 - RNA, 19 nt, Artificial Sequence
  Synthetic
ggaguguacuggaagaaau

SEQ ID NO: 4390 - RNA, 19 nt, Artificial Sequence
  Synthetic
aaaucaaggagaaggacaa

SEQ ID NO: 4391 - RNA, 19 nt, Artificial Sequence
  Synthetic
gcaaggugguggagugcuu

SEQ ID NO: 4392 - RNA, 19 nt, Artificial Sequence
  Synthetic
aaggagaaggacaaagaaa

SEQ ID NO: 4393 - RNA, 19 nt, Artificial Sequence
  Synthetic
aggagaaggacaaagaaaa

SEQ ID NO: 4394 - RNA, 19 nt, Artificial Sequence
  Synthetic
ccaagagcgauaugagauu

SEQ ID NO: 4395 - RNA, 19 nt, Artificial Sequence
  Synthetic
ggaccaugccagagggaag

SEQ ID NO: 4396 - RNA, 19 nt, Artificial Sequence
  Synthetic
gagaaucagcugacccaua

SEQ ID NO: 4397 - RNA, 19 nt, Artificial Sequence
  Synthetic
guuugugaauucugaguuu

SEQ ID NO: 4398 - RNA, 19 nt, Artificial Sequence
  Synthetic
gaggaggauguuagaauuu

SEQ ID NO: 4399 - RNA, 19 nt, Artificial Sequence
  Synthetic
uggugaugauggagaagau

SEQ ID NO: 4400 - RNA, 19 nt, Artificial Sequence
  Synthetic
gagaauaacuuccagccuu

SEQ ID NO: 4401 - RNA, 19 nt, Artificial Sequence
  Synthetic
ucgggaacaugaagggaga

SEQ ID NO: 4402 - RNA, 19 nt, Artificial Sequence
  Synthetic
ccacgaagaucucggucca

SEQ ID NO: 4403 - RNA, 19 nt, Artificial Sequence
  Synthetic
gccgguaugugaaggagaa

SEQ ID NO: 4404 - RNA, 19 nt, Artificial Sequence
  Synthetic
ucaaggagaaggacaaaga

SEQ ID NO: 4405 - RNA, 19 nt, Artificial Sequence
  Synthetic
acaagagcugugaggagaa

SEQ ID NO: 4406 - RNA, 19 nt, Artificial Sequence
  Synthetic
gguucaacuuccacgguca

SEQ ID NO: 4407 - RNA, 19 nt, Artificial Sequence
  Synthetic
gagaagucagugaagaaca

SEQ ID NO: 4408 - RNA, 19 nt, Artificial Sequence
  Synthetic
augaagggagacugcgaua

SEQ ID NO: 4409 - RNA, 19 nt, Artificial Sequence
  Synthetic
cgauggaagaggaggaggu

SEQ ID NO: 4410 - RNA, 19 nt, Artificial Sequence
  Synthetic
augaggaggauguuagaau

SEQ ID NO: 4411 - RNA, 19 nt, Artificial Sequence
  Synthetic
gugaauucugaguuugaaa

SEQ ID NO: 4412 - RNA, 19 nt, Artificial Sequence
  Synthetic
gcauucucuuugaguacua

SEQ ID NO: 4413 - RNA, 19 nt, Artificial Sequence
  Synthetic
ccaggaagcagaaauauuu

SEQ ID NO: 4414 - RNA, 19 nt, Artificial Sequence
  Synthetic
gcaagaacaccuuugaguu

SEQ ID NO: 4415 - RNA, 19 nt, Artificial Sequence
  Synthetic
ggagauacguugacgaaua

SEQ ID NO: 4416 - RNA, 19 nt, Artificial Sequence
  Synthetic
ugaugaagaacaugagaaa

SEQ ID NO: 4417 - RNA, 19 nt, Artificial Sequence
  Synthetic
gauccaacucaaagaauua

SEQ ID NO: 4418 - RNA, 19 nt, Artificial Sequence
  Synthetic
guaaagagcaccuggcaau

SEQ ID NO: 4419 - RNA, 19 nt, Artificial Sequence
  Synthetic
aggaaaagauccaggagua

SEQ ID NO: 4420 - RNA, 19 nt, Artificial Sequence
  Synthetic
gcaaaguuguagagugcau

SEQ ID NO: 4421 - RNA, 19 nt, Artificial Sequence
  Synthetic
caugaaagcuaucguggaa

SEQ ID NO: 4422 - RNA, 19 nt, Artificial Sequence
  Synthetic
ccuaaaaggaagcgcaaua

SEQ ID NO: 4423 - RNA, 19 nt, Artificial Sequence
  Synthetic
gcaaguauuuucaccauaa

SEQ ID NO: 4424 - RNA, 19 nt, Artificial Sequence
  Synthetic
guucagaaauccaaguauu

SEQ ID NO: 4425 - RNA, 19 nt, Artificial Sequence
  Synthetic
uggcaaugauggaacgaau

SEQ ID NO: 4426 - RNA, 19 nt, Artificial Sequence
  Synthetic
agacauuaucacagagaca

SEQ ID NO: 4427 - RNA, 19 nt, Artificial Sequence
  Synthetic
gcaaaccguugaaggaauu

SEQ ID NO: 4428 - RNA, 19 nt, Artificial Sequence
  Synthetic
cggaagaggagaucucaua

SEQ ID NO: 4429 - RNA, 19 nt, Artificial Sequence
  Synthetic
acacaagagaacaggcauu

SEQ ID NO: 4430 - RNA, 19 nt, Artificial Sequence
  Synthetic
gauugggauagcagagaaa

SEQ ID NO: 4431 - RNA, 19 nt, Artificial Sequence
  Synthetic
ggacuuaguacuuacgauu

SEQ ID NO: 4432 - RNA, 19 nt, Artificial Sequence
  Synthetic
augaagaacaugagaaacu

SEQ ID NO: 4433 - RNA, 19 nt, Artificial Sequence
  Synthetic
agacauugaaagcggguau

SEQ ID NO: 4434 - RNA, 19 nt, Artificial Sequence
  Synthetic
guucgaagaauguuagaau

SEQ ID NO: 4435 - RNA, 19 nt, Artificial Sequence
  Synthetic
ucuaagagcaagauaugaa

SEQ ID NO: 4436 - RNA, 19 nt, Artificial Sequence
  Synthetic
cugucaaaguggagacguu

SEQ ID NO: 4437 - RNA, 19 nt, Artificial Sequence
  Synthetic
gaauaugauccaacucaaa

SEQ ID NO: 4438 - RNA, 19 nt, Artificial Sequence
  Synthetic
gaagagccaccgaaggaaa

SEQ ID NO: 4439 - RNA, 19 nt, Artificial Sequence
  Synthetic
guauagaggaugaugagga

SEQ ID NO: 4440 - RNA, 19 nt, Artificial Sequence
  Synthetic
aaucaguggucuuacuaua

SEQ ID NO: 4441 - RNA, 19 nt, Artificial Sequence
  Synthetic
ccaggaguauagaggauga

SEQ ID NO: 4442 - RNA, 19 nt, Artificial Sequence
  Synthetic
aggaugaugaggaggguca

SEQ ID NO: 4443 - RNA, 19 nt, Artificial Sequence
  Synthetic
acgaauauuaggacccaua

SEQ ID NO: 4444 - RNA, 19 nt, Artificial Sequence
  Synthetic
ggcaaugauggaacgaaua

SEQ ID NO: 4445 - RNA, 19 nt, Artificial Sequence
  Synthetic
gcagaaagaagaagaguaa

SEQ ID NO: 4446 - RNA, 19 nt, Artificial Sequence
  Synthetic
agaaagaagaagaguaaga

SEQ ID NO: 4447 - RNA, 19 nt, Artificial Sequence
  Synthetic
cagaagugcugcugagaca

SEQ ID NO: 4448 - RNA, 19 nt, Artificial Sequence
  Synthetic
gcgagaagauccuaaauga

SEQ ID NO: 4449 - RNA, 19 nt, Artificial Sequence
  Synthetic
gggaugaggucuccgguuu

SEQ ID NO: 4450 - RNA, 19 nt, Artificial Sequence
  Synthetic
agaagaagaguaagaauca

SEQ ID NO: 4451 - RNA, 19 nt, Artificial Sequence
  Synthetic
ggcagaaagaagaagagua

SEQ ID NO: 4452 - RNA, 19 nt, Artificial Sequence
  Synthetic
gagaagauccuaaaugaga

SEQ ID NO: 4453 - RNA, 19 nt, Artificial Sequence
  Synthetic
gcaucaagcagguucacua

SEQ ID NO: 4454 - RNA, 19 nt, Artificial Sequence
  Synthetic
cugagaaauuguauagcuu

SEQ ID NO: 4455 - RNA, 19 nt, Artificial Sequence
  Synthetic
gaaucagggaccagcuuua

SEQ ID NO: 4456 - RNA, 19 nt, Artificial Sequence
  Synthetic
aagcaguggagauggauuu

SEQ ID NO: 4457 - RNA, 19 nt, Artificial Sequence
  Synthetic
gcacaaagcacuucuccuu

SEQ ID NO: 4458 - RNA, 19 nt, Artificial Sequence
  Synthetic
cugagaacauggaacugaa

SEQ ID NO: 4459 - RNA, 19 nt, Artificial Sequence
  Synthetic
uguggaagagguagaggua

SEQ ID NO: 4460 - RNA, 19 nt, Artificial Sequence
  Synthetic
ccuccuaggauaauaaaca

SEQ ID NO: 4461 - RNA, 19 nt, Artificial Sequence
  Synthetic
gaagauccuaaaugagauu

SEQ ID NO: 4462 - RNA, 19 nt, Artificial Sequence
  Synthetic
gcacuguccaggugaacuu

SEQ ID NO: 4463 - RNA, 19 nt, Artificial Sequence
  Synthetic
aagaagaagaguaagaauc

SEQ ID NO: 4464 - RNA, 19 nt, Artificial Sequence
  Synthetic
caguggagauggauuugaa

SEQ ID NO: 4465 - RNA, 19 nt, Artificial Sequence
  Synthetic
ggguugacuacuccaauaa

SEQ ID NO: 4466 - RNA, 19 nt, Artificial Sequence
  Synthetic
ccaaggagcugcuggaaca

SEQ ID NO: 4467 - RNA, 19 nt, Artificial Sequence
  Synthetic
ggacaugaucagaagaaga

SEQ ID NO: 4468 - RNA, 19 nt, Artificial Sequence
  Synthetic
uagaagaagugcuggguga

SEQ ID NO: 4469 - RNA, 19 nt, Artificial Sequence
  Synthetic
gcuuagugcugaagaagau

SEQ ID NO: 4470 - RNA, 19 nt, Artificial Sequence
  Synthetic
guaagaacauggugaggga

SEQ ID NO: 4471 - RNA, 19 nt, Artificial Sequence
  Synthetic
gguuugugcucaagggaca

SEQ ID NO: 4472 - RNA, 19 nt, Artificial Sequence
  Synthetic
gcuccaggcuacagacaga

SEQ ID NO: 4473 - RNA, 19 nt, Artificial Sequence
  Synthetic
gaacaguggcggagcucuu

SEQ ID NO: 4474 - RNA, 19 nt, Artificial Sequence
  Synthetic
agagcacacucaaggcaaa

SEQ ID NO: 4475 - RNA, 19 nt, Artificial Sequence
  Synthetic
cuguggagcuguugcauga

SEQ ID NO: 4476 - RNA, 19 nt, Artificial Sequence
  Synthetic
gcugcagguccuagaagaa

SEQ ID NO: 4477 - RNA, 19 nt, Artificial Sequence
  Synthetic
agacagcagugaagaggca

SEQ ID NO: 4478 - RNA, 19 nt, Artificial Sequence
  Synthetic
cagaggacccggacgauga

SEQ ID NO: 4479 - RNA, 19 nt, Artificial Sequence
  Synthetic
gacaugaucagaagaagaa

SEQ ID NO: 4480 - RNA, 19 nt, Artificial Sequence
  Synthetic
gagacgagguuguccagau

SEQ ID NO: 4481 - RNA, 19 nt, Artificial Sequence
  Synthetic
gaucagaagaagaaauaug

SEQ ID NO: 4482 - RNA, 19 nt, Artificial Sequence
  Synthetic
aagaggcacuggaaggaau

SEQ ID NO: 4483 - RNA, 19 nt, Artificial Sequence
  Synthetic
ggagagaaguuccgccagu

SEQ ID NO: 4484 - RNA, 19 nt, Artificial Sequence
  Synthetic
ccaaccaaauaaagucaau

SEQ ID NO: 4485 - RNA, 19 nt, Artificial Sequence
  Synthetic
gcugauacccugacagauc

SEQ ID NO: 4486 - RNA, 19 nt, Artificial Sequence
  Synthetic
guggacaugaucagaagaa

SEQ ID NO: 4487 - RNA, 19 nt, Artificial Sequence
  Synthetic
acgagguuguccagaucaa

SEQ ID NO: 4488 - RNA, 19 nt, Artificial Sequence
  Synthetic
caugaucagaagaagaaau

SEQ ID NO: 4489 - RNA, 19 nt, Artificial Sequence
  Synthetic
gcuggcuccuguugcgaaa

SEQ ID NO: 4490 - RNA, 19 nt, Artificial Sequence
  Synthetic
cccaugacuuccagagcau

SEQ ID NO: 4491 - RNA, 19 nt, Artificial Sequence
  Synthetic
gcugagaggucuugacgac

SEQ ID NO: 4492 - RNA, 19 nt, Artificial Sequence
  Synthetic
cagaagaagaaauaugugu

SEQ ID NO: 4493 - RNA, 19 nt, Artificial Sequence
  Synthetic
ucaucaaugucuccaacua

SEQ ID NO: 4494 - RNA, 19 nt, Artificial Sequence
  Synthetic
gagacuuguuggaggagcu

SEQ ID NO: 4495 - RNA, 19 nt, Artificial Sequence
  Synthetic
gcaacuuggcugagagguc

SEQ ID NO: 4496 - RNA, 19 nt, Artificial Sequence
  Synthetic
cggagaaugaagaggacaa

SEQ ID NO: 4497 - RNA, 19 nt, Artificial Sequence
  Synthetic
cgauuaugggauaggagaa

SEQ ID NO: 4498 - RNA, 19 nt, Artificial Sequence
  Synthetic
gggaauaagaagcagcuga

SEQ ID NO: 4499 - RNA, 19 nt, Artificial Sequence
  Synthetic
ucgcaaagcuggcccgaga

SEQ ID NO: 4500 - RNA, 19 nt, Artificial Sequence
  Synthetic
gcucaaagccggcugcaga

SEQ ID NO: 4501 - RNA, 19 nt, Artificial Sequence
  Synthetic
gcucaauagcucagcgacu

SEQ ID NO: 4502 - RNA, 19 nt, Artificial Sequence
  Synthetic
ggagaaugaagaggacaaa

SEQ ID NO: 4503 - RNA, 19 nt, Artificial Sequence
  Synthetic
ccucagacauacggagaau

SEQ ID NO: 4504 - RNA, 19 nt, Artificial Sequence
  Synthetic
guggaacaucugagugaau

SEQ ID NO: 4505 - RNA, 19 nt, Artificial Sequence
  Synthetic
gaagagaaguagaagaaaa

SEQ ID NO: 4506 - RNA, 19 nt, Artificial Sequence
  Synthetic
gggauaaagugguagaaga

SEQ ID NO: 4507 - RNA, 19 nt, Artificial Sequence
  Synthetic
cagaagagaaguagaagaa

SEQ ID NO: 4508 - RNA, 19 nt, Artificial Sequence
  Synthetic
ggauaaagugguagaagau

SEQ ID NO: 4509 - RNA, 19 nt, Artificial Sequence
  Synthetic
aaggagaaaugaagguaua

SEQ ID NO: 4510 - RNA, 19 nt, Artificial Sequence
  Synthetic
gaacagaggaagcauauaa

SEQ ID NO: 4511 - RNA, 19 nt, Artificial Sequence
  Synthetic
gguagaagaugaugaagau

SEQ ID NO: 4512 - RNA, 19 nt, Artificial Sequence
  Synthetic
gaaaagaagaacagaggaa

SEQ ID NO: 4513 - RNA, 19 nt, Artificial Sequence
  Synthetic
uguuaagggcaguggcaaa

SEQ ID NO: 4514 - RNA, 19 nt, Artificial Sequence
  Synthetic
gaguauggcugcagaggau

SEQ ID NO: 4515 - RNA, 19 nt, Artificial Sequence
  Synthetic
gcaguugguuguagaagaa

SEQ ID NO: 4516 - RNA, 19 nt, Artificial Sequence
  Synthetic
uugaagagauggugcagaa

SEQ ID NO: 4517 - RNA, 19 nt, Artificial Sequence
  Synthetic
gguuguagaagaaggagaa

SEQ ID NO: 4518 - RNA, 19 nt, Artificial Sequence
  Synthetic
auaaggaaacugagaagaa

SEQ ID NO: 4519 - RNA, 19 nt, Artificial Sequence
  Synthetic
auggaaacauuuagagaca

SEQ ID NO: 4520 - RNA, 19 nt, Artificial Sequence
  Synthetic
gggcaguggcaaagcgaga

SEQ ID NO: 4521 - RNA, 19 nt, Artificial Sequence
  Synthetic
ugggaaacaacuauagaaa

SEQ ID NO: 4522 - RNA, 19 nt, Artificial Sequence
  Synthetic
gguauacagaagagaagua

SEQ ID NO: 4523 - RNA, 19 nt, Artificial Sequence
  Synthetic
ucaaagggauaaaguggua

SEQ ID NO: 4524 - RNA, 19 nt, Artificial Sequence
  Synthetic
auaaagugguagaagauga

SEQ ID NO: 4525 - RNA, 19 nt, Artificial Sequence
  Synthetic
gugagaaguuggcugaaau

SEQ ID NO: 4526 - RNA, 19 nt, Artificial Sequence
  Synthetic
auacagaagagaaguagaa

SEQ ID NO: 4527 - RNA, 19 nt, Artificial Sequence
  Synthetic
ggcagaagagacuggauaa

SEQ ID NO: 4528 - RNA, 19 nt, Artificial Sequence
  Synthetic
caagaaaggccacaguuua

SEQ ID NO: 4529 - RNA, 19 nt, Artificial Sequence
  Synthetic
gaagaacagaggaagcaua

SEQ ID NO: 4530 - RNA, 19 nt, Artificial Sequence
  Synthetic
cuuuaaaggggaagcgaua

SEQ ID NO: 4531 - RNA, 19 nt, Artificial Sequence
  Synthetic
ggaaacaacuauagaaaac

SEQ ID NO: 4532 - RNA, 19 nt, Artificial Sequence
  Synthetic
ggacaugaagucugcaauu

SEQ ID NO: 4533 - RNA, 19 nt, Artificial Sequence
  Synthetic
ugguagaagaugaugaaga

SEQ ID NO: 4534 - RNA, 19 nt, Artificial Sequence
  Synthetic
cgugagaaguuggcugaaa

SEQ ID NO: 4535 - RNA, 19 nt, Artificial Sequence
  Synthetic
gcacggaauaucagaauaa

SEQ ID NO: 4536 - RNA, 19 nt, Artificial Sequence
  Synthetic
uggaacaauuacaggacuu

SEQ ID NO: 4537 - RNA, 19 nt, Artificial Sequence
  Synthetic
cggacgaggccguguuaga

SEQ ID NO: 4538 - RNA, 19 nt, Artificial Sequence
  Synthetic
acugggaaguauaggcaga

SEQ ID NO: 4539 - RNA, 19 nt, Artificial Sequence
  Synthetic
acauacuagaggcaggaaa

SEQ ID NO: 4540 - RNA, 19 nt, Artificial Sequence
  Synthetic
uaaauuugacagagagcga

SEQ ID NO: 4541 - RNA, 19 nt, Artificial Sequence
  Synthetic
cuagaaauccuacugggaa

SEQ ID NO: 4542 - RNA, 19 nt, Artificial Sequence
  Synthetic
cuuaaagaugcuucgaaaa

SEQ ID NO: 4543 - RNA, 19 nt, Artificial Sequence
  Synthetic
uagaaauccuacugggaag

SEQ ID NO: 4544 - RNA, 19 nt, Artificial Sequence
  Synthetic
gcacuuaucuagaagacug

SEQ ID NO: 4545 - RNA, 19 nt, Artificial Sequence
  Synthetic
ggauaaagauauaggguca

SEQ ID NO: 4546 - RNA, 19 nt, Artificial Sequence
  Synthetic
ccauuaagguggaguguua

SEQ ID NO: 4547 - RNA, 19 nt, Artificial Sequence
  Synthetic
gagcaagacuuucaggaua

SEQ ID NO: 4548 - RNA, 19 nt, Artificial Sequence
  Synthetic
gcacagaggaaauaauaua

SEQ ID NO: 4549 - RNA, 19 nt, Artificial Sequence
  Synthetic
gauaagaggaccaaacaua

SEQ ID NO: 4550 - RNA, 19 nt, Artificial Sequence
  Synthetic
cagacaagcuauaguuaau

SEQ ID NO: 4551 - RNA, 19 nt, Artificial Sequence
  Synthetic
caucauaauuguuggaguu

SEQ ID NO: 4552 - RNA, 19 nt, Artificial Sequence
  Synthetic
ucacaaagguggcgcugaa

SEQ ID NO: 4553 - RNA, 19 nt, Artificial Sequence
  Synthetic
ggaaaugacacauaaagua

SEQ ID NO: 4554 - RNA, 19 nt, Artificial Sequence
  Synthetic
ggaaauaauauaccagcua

SEQ ID NO: 4555 - RNA, 19 nt, Artificial Sequence
  Synthetic
gcacauuccuugacuauau

SEQ ID NO: 4556 - RNA, 19 nt, Artificial Sequence
  Synthetic
gcacagaaaggauuaagaa

SEQ ID NO: 4557 - RNA, 19 nt, Artificial Sequence
  Synthetic
gcuaaugguucaucggaca

SEQ ID NO: 4558 - RNA, 19 nt, Artificial Sequence
  Synthetic
ggaucuauuuggaaaguca

SEQ ID NO: 4559 - RNA, 19 nt, Artificial Sequence
  Synthetic
cagaaaggauuaagaauug

SEQ ID NO: 4560 - RNA, 19 nt, Artificial Sequence
  Synthetic
cuacaagaauucagguguu

SEQ ID NO: 4561 - RNA, 19 nt, Artificial Sequence
  Synthetic
ggaaagcugucuucacuaa

SEQ ID NO: 4562 - RNA, 19 nt, Artificial Sequence
  Synthetic
gaaguggccaucagagaua

SEQ ID NO: 4563 - RNA, 19 nt, Artificial Sequence
  Synthetic
gcagacagcuucucaauau

SEQ ID NO: 4564 - RNA, 19 nt, Artificial Sequence
  Synthetic
cuauauaaugggaggaugu

SEQ ID NO: 4565 - RNA, 19 nt, Artificial Sequence
  Synthetic
ugaauguacccuuggacaa

SEQ ID NO: 4566 - RNA, 19 nt, Artificial Sequence
  Synthetic
ugugaaacagugugagauu

SEQ ID NO: 4567 - RNA, 19 nt, Artificial Sequence
  Synthetic
ccacgaaacaacagaagca

SEQ ID NO: 4568 - RNA, 19 nt, Artificial Sequence
  Synthetic
agauauagggucaaaguca

SEQ ID NO: 4569 - RNA, 19 nt, Artificial Sequence
  Synthetic
gcgaaguggccaucagaga

SEQ ID NO: 4570 - RNA, 19 nt, Artificial Sequence
  Synthetic
gaaacuggcuaaugguuca

SEQ ID NO: 4571 - RNA, 19 nt, Artificial Sequence
  Synthetic
agguguuaucagugugaaa

SEQ ID NO: 4572 - RNA, 19 nt, Artificial Sequence
  Synthetic
gguaugagguugagcgcac

SEQ ID NO: 4573 - RNA, 19 nt, Artificial Sequence
  Synthetic
uugaaauggaagccagaaa

SEQ ID NO: 4574 - RNA, 19 nt, Artificial Sequence
  Synthetic
ggauggugaugguggaagu

SEQ ID NO: 4575 - RNA, 19 nt, Artificial Sequence
  Synthetic
cugagaagccagaagauaa

SEQ ID NO: 4576 - RNA, 19 nt, Artificial Sequence
  Synthetic
cuccaaaucucaugaaaua

SEQ ID NO: 4577 - RNA, 19 nt, Artificial Sequence
  Synthetic
gcgccuaccucaaggacaa

SEQ ID NO: 4578 - RNA, 19 nt, Artificial Sequence
  Synthetic
ggacagaaauugaagauuc

SEQ ID NO: 4579 - RNA, 19 nt, Artificial Sequence
  Synthetic
gaaaggcguuggacagaaa

SEQ ID NO: 4580 - RNA, 19 nt, Artificial Sequence
  Synthetic
ggacagugacggcgaguuu

SEQ ID NO: 4581 - RNA, 19 nt, Artificial Sequence
  Synthetic
ugauggagccgguggagaa

SEQ ID NO: 4582 - RNA, 19 nt, Artificial Sequence
  Synthetic
gcacgugccuccugagaga

SEQ ID NO: 4583 - RNA, 19 nt, Artificial Sequence
  Synthetic
ugagaagccagaagauaaa

SEQ ID NO: 4584 - RNA, 19 nt, Artificial Sequence
  Synthetic
ggacagaccuggguuguua

SEQ ID NO: 4585 - RNA, 19 nt, Artificial Sequence
  Synthetic
uggcagaaccugacuaaau

SEQ ID NO: 4586 - RNA, 19 nt, Artificial Sequence
  Synthetic
acacauugauuguuagcau

SEQ ID NO: 4587 - RNA, 19 nt, Artificial Sequence
  Synthetic
gaucaccaguguuggagaa

SEQ ID NO: 4588 - RNA, 19 nt, Artificial Sequence
  Synthetic
ggcagaaccugacuaaaua

SEQ ID NO: 4589 - RNA, 19 nt, Artificial Sequence
  Synthetic
ccucagcccuugacaggaa

SEQ ID NO: 4590 - RNA, 19 nt, Artificial Sequence
  Synthetic
ggagaaggaacgagcaucu

SEQ ID NO: 4591 - RNA, 19 nt, Artificial Sequence
  Synthetic
gauuggagauucagugcau

SEQ ID NO: 4592 - RNA, 19 nt, Artificial Sequence
  Synthetic
cauaggaacaucugucaua

SEQ ID NO: 4593 - RNA, 19 nt, Artificial Sequence
  Synthetic
cucauauacugaugugaua

SEQ ID NO: 4594 - RNA, 19 nt, Artificial Sequence
  Synthetic
gcaggcagguggaguccua

SEQ ID NO: 4595 - RNA, 19 nt, Artificial Sequence
  Synthetic
gaagcugauuggagauuca

SEQ ID NO: 4596 - RNA, 19 nt, Artificial Sequence
  Synthetic
caaucaagcagcaauggua

SEQ ID NO: 4597 - RNA, 19 nt, Artificial Sequence
  Synthetic
gaacugugagccaaauaaa

SEQ ID NO: 4598 - RNA, 19 nt, Artificial Sequence
  Synthetic
gcaacaagcuuucuaccuu

SEQ ID NO: 4599 - RNA, 19 nt, Artificial Sequence
  Synthetic
guguguguguguauauaua

SEQ ID NO: 4600 - RNA, 19 nt, Artificial Sequence
  Synthetic
agaacguccucuuguguau

SEQ ID NO: 4601 - RNA, 19 nt, Artificial Sequence
  Synthetic
ggaaaggcguuggacagaa

SEQ ID NO: 4602 - RNA, 19 nt, Artificial Sequence
  Synthetic
uaagauagcuguagagaua

SEQ ID NO: 4603 - RNA, 19 nt, Artificial Sequence
  Synthetic
ggagaaaccugguaacaua

SEQ ID NO: 4604 - RNA, 19 nt, Artificial Sequence
  Synthetic
ugaaacaacuacuggaaua

SEQ ID NO: 4605 - RNA, 19 nt, Artificial Sequence
  Synthetic
ggauauaggacaaggugua

SEQ ID NO: 4606 - RNA, 19 nt, Artificial Sequence
  Synthetic
gaacaaaggcagauaaaca

SEQ ID NO: 4607 - RNA, 19 nt, Artificial Sequence
  Synthetic
caucauaguucuacaguuu

SEQ ID NO: 4608 - RNA, 19 nt, Artificial Sequence
  Synthetic
gcuaagaauugcagaacca

SEQ ID NO: 4609 - RNA, 19 nt, Artificial Sequence
  Synthetic
agauaaacugcgagaggua

SEQ ID NO: 4610 - RNA, 19 nt, Artificial Sequence
  Synthetic
gcauaaacaccgaggaacu

SEQ ID NO: 4611 - RNA, 19 nt, Artificial Sequence
  Synthetic
cagguagauuacagagaua

SEQ ID NO: 4612 - RNA, 19 nt, Artificial Sequence
  Synthetic
uuggauugcugaagaauaa

SEQ ID NO: 4613 - RNA, 19 nt, Artificial Sequence
  Synthetic
gcaauauaaucaaugggaa

SEQ ID NO: 4614 - RNA, 19 nt, Artificial Sequence
  Synthetic
caaagaagguggugugcca

SEQ ID NO: 4615 - RNA, 19 nt, Artificial Sequence
  Synthetic
ugaaugagcaggaaacaaa

SEQ ID NO: 4616 - RNA, 19 nt, Artificial Sequence
  Synthetic
cagcaaucccuuugaguuu

SEQ ID NO: 4617 - RNA, 19 nt, Artificial Sequence
  Synthetic
gugugaagauccaguguau

SEQ ID NO: 4618 - RNA, 19 nt, Artificial Sequence
  Synthetic
gugcauaaacaccgaggaa

SEQ ID NO: 4619 - RNA, 19 nt, Artificial Sequence
  Synthetic
ugaacauacuagugucaaa

SEQ ID NO: 4620 - RNA, 19 nt, Artificial Sequence
  Synthetic
ggacagagguugcugaacu

SEQ ID NO: 4621 - RNA, 19 nt, Artificial Sequence
  Synthetic
gaacuggacugaugaccaa

SEQ ID NO: 4622 - RNA, 19 nt, Artificial Sequence
  Synthetic
gaacaagaucuaagucauu

SEQ ID NO: 4623 - RNA, 19 nt, Artificial Sequence
  Synthetic
cuaugaaacucaagucaga

SEQ ID NO: 4624 - RNA, 19 nt, Artificial Sequence
  Synthetic
cagaagaaacaguggauac

SEQ ID NO: 4625 - RNA, 19 nt, Artificial Sequence
  Synthetic
gaaggaaguugcugcccaa

SEQ ID NO: 4626 - RNA, 19 nt, Artificial Sequence
  Synthetic
gggaaaugugaauguaaca

SEQ ID NO: 4627 - RNA, 19 nt, Artificial Sequence
  Synthetic
cuguucugaucgaggguua

SEQ ID NO: 4628 - RNA, 19 nt, Artificial Sequence
  Synthetic
guaccuaauuacugcaaaa

SEQ ID NO: 4629 - RNA, 19 nt, Artificial Sequence
  Synthetic
ccagagaaugcuaagaauu

SEQ ID NO: 4630 - RNA, 19 nt, Artificial Sequence
  Synthetic
ggucuaaagccacaaguuu

SEQ ID NO: 4631 - RNA, 19 nt, Artificial Sequence
  Synthetic
cauucuaccugcaguuuaa

SEQ ID NO: 4632 - RNA, 19 nt, Artificial Sequence
  Synthetic
cagcaaagauggauggaaa

SEQ ID NO: 4633 - RNA, 19 nt, Artificial Sequence
  Synthetic
ggacaaagacacaggagaa

SEQ ID NO: 4634 - RNA, 19 nt, Artificial Sequence
  Synthetic
ggaaauugucacagauaaa

SEQ ID NO: 4635 - RNA, 19 nt, Artificial Sequence
  Synthetic
gaaagaagacaaacagaaa

SEQ ID NO: 4636 - RNA, 19 nt, Artificial Sequence
  Synthetic
gagacuagacaaugagaaa

SEQ ID NO: 4637 - RNA, 19 nt, Artificial Sequence
  Synthetic
ggaaagaacgggagcugaa

SEQ ID NO: 4638 - RNA, 19 nt, Artificial Sequence
  Synthetic
gaguaaaagucaucgaaaa

SEQ ID NO: 4639 - RNA, 19 nt, Artificial Sequence
  Synthetic
gggaagagggagaggaguu

SEQ ID NO: 4640 - RNA, 19 nt, Artificial Sequence
  Synthetic
aaguaaaguuggaugagaa

SEQ ID NO: 4641 - RNA, 19 nt, Artificial Sequence
  Synthetic
guacugagccugugaagaa

SEQ ID NO: 4642 - RNA, 19 nt, Artificial Sequence
  Synthetic
ucucauaccucgagcaauu

SEQ ID NO: 4643 - RNA, 19 nt, Artificial Sequence
  Synthetic
gcugaauaacagugggcaa

SEQ ID NO: 4644 - RNA, 19 nt, Artificial Sequence
  Synthetic
gcacaaagaccggaguaaa

SEQ ID NO: 4645 - RNA, 19 nt, Artificial Sequence
  Synthetic
ggaaaguaaaguuggauga

SEQ ID NO: 4646 - RNA, 19 nt, Artificial Sequence
  Synthetic
cgagaagcaucuuguuaaa

SEQ ID NO: 4647 - RNA, 19 nt, Artificial Sequence
  Synthetic
guaccgaccuccagaacua

SEQ ID NO: 4648 - RNA, 19 nt, Artificial Sequence
  Synthetic
guauauaaagccagggaca

SEQ ID NO: 4649 - RNA, 19 nt, Artificial Sequence
  Synthetic
guuguuaacaugaaggaaa

SEQ ID NO: 4650 - RNA, 19 nt, Artificial Sequence
  Synthetic
ggaaaggaguccaaggguu

SEQ ID NO: 4651 - RNA, 19 nt, Artificial Sequence
  Synthetic
ugaagaaagagaaggaaca

SEQ ID NO: 4652 - RNA, 19 nt, Artificial Sequence
  Synthetic
caaacaggacuuauggaaa

SEQ ID NO: 4653 - RNA, 19 nt, Artificial Sequence
  Synthetic
aaguagaaguccugcauau

SEQ ID NO: 4654 - RNA, 19 nt, Artificial Sequence
  Synthetic
caaagacacaggagaacua

SEQ ID NO: 4655 - RNA, 19 nt, Artificial Sequence
  Synthetic
guucaaagcguucgaauga

SEQ ID NO: 4656 - RNA, 19 nt, Artificial Sequence
  Synthetic
auauaaagccagggacaaa

SEQ ID NO: 4657 - RNA, 19 nt, Artificial Sequence
  Synthetic
agaaagaagacaaacagaa

SEQ ID NO: 4658 - RNA, 19 nt, Artificial Sequence
  Synthetic
cagcugacaugcagaauau

SEQ ID NO: 4659 - RNA, 19 nt, Artificial Sequence
  Synthetic
cugaauaacagugggcaaa

SEQ ID NO: 4660 - RNA, 19 nt, Artificial Sequence
  Synthetic
ccacaaugccacaggagga

SEQ ID NO: 4661 - RNA, 19 nt, Artificial Sequence
  Synthetic
uaauggaaggauuggaaua

SEQ ID NO: 4662 - RNA, 19 nt, Artificial Sequence
  Synthetic
cagaagauaaccuggaaua

SEQ ID NO: 4663 - RNA, 19 nt, Artificial Sequence
  Synthetic
gcacacaaguggagagaag

SEQ ID NO: 4664 - RNA, 19 nt, Artificial Sequence
  Synthetic
gggugagauccuagugaua

SEQ ID NO: 4665 - RNA, 19 nt, Artificial Sequence
  Synthetic
gagagaaguugacguggaa

SEQ ID NO: 4666 - RNA, 19 nt, Artificial Sequence
  Synthetic
aagcauggaaauaggaauu

SEQ ID NO: 4667 - RNA, 19 nt, Artificial Sequence
  Synthetic
gugagauccuagugauaau

SEQ ID NO: 4668 - RNA, 19 nt, Artificial Sequence
  Synthetic
gcaaagaguagccgauuuu

SEQ ID NO: 4669 - RNA, 19 nt, Artificial Sequence
  Synthetic
aagugaaccuuaaggaaga

SEQ ID NO: 4670 - RNA, 19 nt, Artificial Sequence
  Synthetic
ggaagugaaccuuaaggaa

SEQ ID NO: 4671 - RNA, 19 nt, Artificial Sequence
  Synthetic
uagagaagccugaagaaca

SEQ ID NO: 4672 - RNA, 19 nt, Artificial Sequence
  Synthetic
ucgaaaagcuugugagauc

SEQ ID NO: 4673 - RNA, 19 nt, Artificial Sequence
  Synthetic
ggaucauaaacuggaaaua

SEQ ID NO: 4674 - RNA, 19 nt, Artificial Sequence
  Synthetic
acacggaaagcauggaaau

SEQ ID NO: 4675 - RNA, 19 nt, Artificial Sequence
  Synthetic
gucacaaggaugaauauaa

SEQ ID NO: 4676 - RNA, 19 nt, Artificial Sequence
  Synthetic
ccgaagaccugcccuuuaa

SEQ ID NO: 4677 - RNA, 19 nt, Artificial Sequence
  Synthetic
caacaggaagugaaccuua

SEQ ID NO: 4678 - RNA, 19 nt, Artificial Sequence
  Synthetic
gaaccuuaaggaagagaga

SEQ ID NO: 4679 - RNA, 19 nt, Artificial Sequence
  Synthetic
acacaaguggagagaaguu

SEQ ID NO: 4680 - RNA, 19 nt, Artificial Sequence
  Synthetic
gguuggugacaucgugaaa

SEQ ID NO: 4681 - RNA, 19 nt, Artificial Sequence
  Synthetic
cucaaaacccagaugaaaa

SEQ ID NO: 4682 - RNA, 19 nt, Artificial Sequence
  Synthetic
ggaugaauauaaauggcca

SEQ ID NO: 4683 - RNA, 19 nt, Artificial Sequence
  Synthetic
auaaauggccagugggaag

SEQ ID NO: 4684 - RNA, 19 nt, Artificial Sequence
  Synthetic
ugauaauagagaagccuga

SEQ ID NO: 4685 - RNA, 19 nt, Artificial Sequence
  Synthetic
uggcauuagagguugguga

SEQ ID NO: 4686 - RNA, 19 nt, Artificial Sequence
  Synthetic
ggaccaggaauuugaccau

SEQ ID NO: 4687 - RNA, 19 nt, Artificial Sequence
  Synthetic
gauccucaccacacggaaa

SEQ ID NO: 4688 - RNA, 19 nt, Artificial Sequence
  Synthetic
ugcgaaagcaauccagaaa

SEQ ID NO: 4689 - RNA, 19 nt, Artificial Sequence
  Synthetic
aagaguacccugugcuuau

SEQ ID NO: 4690 - RNA, 19 nt, Artificial Sequence
  Synthetic
cauuagagguuggugacau

SEQ ID NO: 4691 - RNA, 19 nt, Artificial Sequence
  Synthetic
ggaugauuccugucccuua

SEQ ID NO: 4692 - RNA, 19 nt, Artificial Sequence
  Synthetic
gagaagaggaagaggaaga

SEQ ID NO: 4693 - RNA, 19 nt, Artificial Sequence
  Synthetic
ggaagaucaucgagagcua

SEQ ID NO: 4694 - RNA, 19 nt, Artificial Sequence
  Synthetic
ggagaagagagaagaggaa

SEQ ID NO: 4695 - RNA, 19 nt, Artificial Sequence
  Synthetic
gagagaagaggaagaggaa

SEQ ID NO: 4696 - RNA, 19 nt, Artificial Sequence
  Synthetic
ccagcaacgugcagggcaa

SEQ ID NO: 4697 - RNA, 19 nt, Artificial Sequence
  Synthetic
cuacacugauacugagaaa

SEQ ID NO: 4698 - RNA, 19 nt, Artificial Sequence
  Synthetic
gggcaauggcagcguggaa

SEQ ID NO: 4699 - RNA, 19 nt, Artificial Sequence
  Synthetic
cugcagagcuggugcggau

SEQ ID NO: 4700 - RNA, 19 nt, Artificial Sequence
  Synthetic
ggugaaggauggauaccaa

SEQ ID NO: 4701 - RNA, 19 nt, Artificial Sequence
  Synthetic
gcagugagcuggaggagga

SEQ ID NO: 4702 - RNA, 19 nt, Artificial Sequence
  Synthetic
gcuaugagggcaacaguua

SEQ ID NO: 4703 - RNA, 19 nt, Artificial Sequence
  Synthetic
ucuauaaacuggugaagga

SEQ ID NO: 4704 - RNA, 19 nt, Artificial Sequence
  Synthetic
ccucggagcuggagccuuu

SEQ ID NO: 4705 - RNA, 19 nt, Artificial Sequence
  Synthetic
guaacgugcuguugaccaa

SEQ ID NO: 4706 - RNA, 19 nt, Artificial Sequence
  Synthetic
gaaggaaggcugaggccau

SEQ ID NO: 4707 - RNA, 19 nt, Artificial Sequence
  Synthetic
acuacauugucaagggcaa

SEQ ID NO: 4708 - RNA, 19 nt, Artificial Sequence
  Synthetic
ggaaauggacugacuuuau

SEQ ID NO: 4709 - RNA, 19 nt, Artificial Sequence
  Synthetic
acauccaccucgagaagaa

SEQ ID NO: 4710 - RNA, 19 nt, Artificial Sequence
  Synthetic
aagucaugguggaggccua

SEQ ID NO: 4711 - RNA, 19 nt, Artificial Sequence
  Synthetic
aguauaagcagaagcccaa

SEQ ID NO: 4712 - RNA, 19 nt, Artificial Sequence
  Synthetic
ggcugaaagugcagaaagu

SEQ ID NO: 4713 - RNA, 19 nt, Artificial Sequence
  Synthetic
ccagcagcguugauguuaa

SEQ ID NO: 4714 - RNA, 19 nt, Artificial Sequence
  Synthetic
cugaaagugcagaaaguca

SEQ ID NO: 4715 - RNA, 19 nt, Artificial Sequence
  Synthetic
ggaacugcggccaggcuaa

SEQ ID NO: 4716 - RNA, 19 nt, Artificial Sequence
  Synthetic
ggacugacuuuaugccuau

SEQ ID NO: 4717 - RNA, 19 nt, Artificial Sequence
  Synthetic
agggaggcgucgacuauaa

SEQ ID NO: 4718 - RNA, 19 nt, Artificial Sequence
  Synthetic
gcaggaaggugauguccau

SEQ ID NO: 4719 - RNA, 19 nt, Artificial Sequence
  Synthetic
uguacaaguauaagcagaa

SEQ ID NO: 4720 - RNA, 19 nt, Artificial Sequence
  Synthetic
cccaggagcuacacugaua

SEQ ID NO: 4721 - RNA, 19 nt, Artificial Sequence
  Synthetic
ucgagagcuaugagggcaa

SEQ ID NO: 4722 - RNA, 19 nt, Artificial Sequence
  Synthetic
caagauaaggagaaagaaa

SEQ ID NO: 4723 - RNA, 19 nt, Artificial Sequence
  Synthetic
ggaacaaagucgccgucaa

SEQ ID NO: 4724 - RNA, 19 nt, Artificial Sequence
  Synthetic
gcgugaucguggaggagaa

SEQ ID NO: 4725 - RNA, 19 nt, Artificial Sequence
  Synthetic
gaaagaaaguacccagcaa

SEQ ID NO: 4726 - RNA, 19 nt, Artificial Sequence
  Synthetic
gagauggaaucguaauaaa

SEQ ID NO: 4727 - RNA, 19 nt, Artificial Sequence
  Synthetic
acggcaagguggagcacua

SEQ ID NO: 4728 - RNA, 19 nt, Artificial Sequence
  Synthetic
gcaucgacgaggaggugua

SEQ ID NO: 4729 - RNA, 19 nt, Artificial Sequence
  Synthetic
gagagcagcuugagcacau

SEQ ID NO: 4730 - RNA, 19 nt, Artificial Sequence
  Synthetic
ugagaagaugucagcaaua

SEQ ID NO: 4731 - RNA, 19 nt, Artificial Sequence
  Synthetic
ccugaggcccugagagaga

SEQ ID NO: 4732 - RNA, 19 nt, Artificial Sequence
  Synthetic
gcaaugugcuggugucuga

SEQ ID NO: 4733 - RNA, 19 nt, Artificial Sequence
  Synthetic
gugagauggaaucguaaua

SEQ ID NO: 4734 - RNA, 19 nt, Artificial Sequence
  Synthetic
ucugcgaggccauggaaua

SEQ ID NO: 4735 - RNA, 19 nt, Artificial Sequence
  Synthetic
cgccagagcuccugagaag

SEQ ID NO: 4736 - RNA, 19 nt, Artificial Sequence
  Synthetic
aagaaaguacccagcaaau

SEQ ID NO: 4737 - RNA, 19 nt, Artificial Sequence
  Synthetic
cgugaaggcggguaccaaa

SEQ ID NO: 4738 - RNA, 19 nt, Artificial Sequence
  Synthetic
gggcaacaauuucgugcau

SEQ ID NO: 4739 - RNA, 19 nt, Artificial Sequence
  Synthetic
cagaauguauugccaagua

SEQ ID NO: 4740 - RNA, 19 nt, Artificial Sequence
  Synthetic
ucauuaaaccaaaggucau

SEQ ID NO: 4741 - RNA, 19 nt, Artificial Sequence
  Synthetic
aaagaaaguacccagcaaa

SEQ ID NO: 4742 - RNA, 19 nt, Artificial Sequence
  Synthetic
gcgauuaccgagggaacaa

SEQ ID NO: 4743 - RNA, 19 nt, Artificial Sequence
  Synthetic
ccucagacgcagauggacu

SEQ ID NO: 4744 - RNA, 19 nt, Artificial Sequence
  Synthetic
gacugaaccuggaagauca

SEQ ID NO: 4745 - RNA, 19 nt, Artificial Sequence
  Synthetic
ggccaaggucagcgacuuu

SEQ ID NO: 4746 - RNA, 19 nt, Artificial Sequence
  Synthetic
ucacugaguacauggccaa

SEQ ID NO: 4747 - RNA, 19 nt, Artificial Sequence
  Synthetic
ugaacaugaaggagcugaa

SEQ ID NO: 4748 - RNA, 19 nt, Artificial Sequence
  Synthetic
cugaggacaacguggccaa

SEQ ID NO: 4749 - RNA, 19 nt, Artificial Sequence
  Synthetic
caacugguacaaagccaaa

SEQ ID NO: 4750 - RNA, 19 nt, Artificial Sequence
  Synthetic
gagacgugaugcugggcga

SEQ ID NO: 4751 - RNA, 19 nt, Artificial Sequence
  Synthetic
gggcgauuaccgagggaac

SEQ ID NO: 4752 - RNA, 19 nt, Artificial Sequence
  Synthetic
ggacaauguuaaagcagaa

SEQ ID NO: 4753 - RNA, 19 nt, Artificial Sequence
  Synthetic
auucauugucggagggaaa

SEQ ID NO: 4754 - RNA, 19 nt, Artificial Sequence
  Synthetic
aagcaugaauugaggaaca

SEQ ID NO: 4755 - RNA, 19 nt, Artificial Sequence
  Synthetic
gaauugaggaacagaagaa

SEQ ID NO: 4756 - RNA, 19 nt, Artificial Sequence
  Synthetic
guggagaaauugugcauau

SEQ ID NO: 4757 - RNA, 19 nt, Artificial Sequence
  Synthetic
cugcagaauuugcgaugua

SEQ ID NO: 4758 - RNA, 19 nt, Artificial Sequence
  Synthetic
ggcuaaaggcugcaacaaa

SEQ ID NO: 4759 - RNA, 19 nt, Artificial Sequence
  Synthetic
aaacuauugucgugggcua

SEQ ID NO: 4760 - RNA, 19 nt, Artificial Sequence
  Synthetic
uaacugagauagugaaaca

SEQ ID NO: 4761 - RNA, 19 nt, Artificial Sequence
  Synthetic
aauauaaacugguacggaa

SEQ ID NO: 4762 - RNA, 19 nt, Artificial Sequence
  Synthetic
ucaagaagguucacaauga

SEQ ID NO: 4763 - RNA, 19 nt, Artificial Sequence
  Synthetic
ccucuguaauugugaauau

SEQ ID NO: 4764 - RNA, 19 nt, Artificial Sequence
  Synthetic
gcuuaauugugcuagaaau

SEQ ID NO: 4765 - RNA, 19 nt, Artificial Sequence
  Synthetic
cugacaaaaccaagaguaa

SEQ ID NO: 4766 - RNA, 19 nt, Artificial Sequence
  Synthetic
acauggaaucauuaggaua

SEQ ID NO: 4767 - RNA, 19 nt, Artificial Sequence
  Synthetic
gcgaggaaguggcagugaa

SEQ ID NO: 4768 - RNA, 19 nt, Artificial Sequence
  Synthetic
aggcaagcaaacugacaaa

SEQ ID NO: 4769 - RNA, 19 nt, Artificial Sequence
  Synthetic
ccuaauggguauugggcgu

SEQ ID NO: 4770 - RNA, 19 nt, Artificial Sequence
  Synthetic
ccagaugaucaguagaauu

SEQ ID NO: 4771 - RNA, 19 nt, Artificial Sequence
  Synthetic
cagaagaacggcaugaaca

SEQ ID NO: 4772 - RNA, 19 nt, Artificial Sequence
  Synthetic
cauggaaucauuaggauau

SEQ ID NO: 4773 - RNA, 19 nt, Artificial Sequence
  Synthetic
agaguaacaugaaagguuu

SEQ ID NO: 4774 - RNA, 19 nt, Artificial Sequence
  Synthetic
guacagagacaacaggaca

SEQ ID NO: 4775 - RNA, 19 nt, Artificial Sequence
  Synthetic
gcuaaaggcugcaacaaag

SEQ ID NO: 4776 - RNA, 19 nt, Artificial Sequence
  Synthetic
cagugaagcuagaaucuca

SEQ ID NO: 4777 - RNA, 19 nt, Artificial Sequence
  Synthetic
agacaacaggacaaggcaa

SEQ ID NO: 4778 - RNA, 19 nt, Artificial Sequence
  Synthetic
accaaagauuccaguguuu

SEQ ID NO: 4779 - RNA, 19 nt, Artificial Sequence
  Synthetic
cuaaaugguugacacacaa

SEQ ID NO: 4780 - RNA, 19 nt, Artificial Sequence
  Synthetic
caguugugaugguuguuaa

SEQ ID NO: 4781 - RNA, 19 nt, Artificial Sequence
  Synthetic
gaacuauacugcuuugaga

SEQ ID NO: 4782 - RNA, 19 nt, Artificial Sequence
  Synthetic
ggacauugcugcaggagaa

SEQ ID NO: 4783 - RNA, 19 nt, Artificial Sequence
  Synthetic
cagaaauacgaaaggauua

SEQ ID NO: 4784 - RNA, 19 nt, Artificial Sequence
  Synthetic
agagagaauugcagagaau

SEQ ID NO: 4785 - RNA, 19 nt, Artificial Sequence
  Synthetic
ccaucgaaguguuguguaa

SEQ ID NO: 4786 - RNA, 19 nt, Artificial Sequence
  Synthetic
gaagaaaagcagagagaga

SEQ ID NO: 4787 - RNA, 19 nt, Artificial Sequence
  Synthetic
ccaccaagagacagaaaua

SEQ ID NO: 4788 - RNA, 19 nt, Artificial Sequence
  Synthetic
gagaagagguugccaucaa

SEQ ID NO: 4789 - RNA, 19 nt, Artificial Sequence
  Synthetic
gcaccuuggaauugaacaa

SEQ ID NO: 4790 - RNA, 19 nt, Artificial Sequence
  Synthetic
gcauggagagagagcggaa

SEQ ID NO: 4791 - RNA, 19 nt, Artificial Sequence
  Synthetic
gagagagagcggaaaguga

SEQ ID NO: 4792 - RNA, 19 nt, Artificial Sequence
  Synthetic
cgaaaggauuagcgagaag

SEQ ID NO: 4793 - RNA, 19 nt, Artificial Sequence
  Synthetic
gagaggagcggcugagaca

SEQ ID NO: 4794 - RNA, 19 nt, Artificial Sequence
  Synthetic
gagagagaauugcagagaa

SEQ ID NO: 4795 - RNA, 19 nt, Artificial Sequence
  Synthetic
acagaaauacgaaaggauu

SEQ ID NO: 4796 - RNA, 19 nt, Artificial Sequence
  Synthetic
caggaaagcgauggugaaa

SEQ ID NO: 4797 - RNA, 19 nt, Artificial Sequence
  Synthetic
gaacaaucccgaagagaug

SEQ ID NO: 4798 - RNA, 19 nt, Artificial Sequence
  Synthetic
aggauuagcgagaagaaaa

SEQ ID NO: 4799 - RNA, 19 nt, Artificial Sequence
  Synthetic
ggucuaggaucgaaauguu

SEQ ID NO: 4800 - RNA, 19 nt, Artificial Sequence
  Synthetic
acaggaaagcgauggugaa

SEQ ID NO: 4801 - RNA, 19 nt, Artificial Sequence
  Synthetic
gcuuaaaucuguguaaaga

SEQ ID NO: 4802 - RNA, 19 nt, Artificial Sequence
  Synthetic
caacacgcaccuuggaauu

SEQ ID NO: 4803 - RNA, 19 nt, Artificial Sequence
  Synthetic
ccucacaggccgacaagau

SEQ ID NO: 4804 - RNA, 19 nt, Artificial Sequence
  Synthetic
acuuggagucucugggcua

SEQ ID NO: 4805 - RNA, 19 nt, Artificial Sequence
  Synthetic
ggauuagcgagaagaaaau

SEQ ID NO: 4806 - RNA, 19 nt, Artificial Sequence
  Synthetic
cuuccgaauuugccacaua

SEQ ID NO: 4807 - RNA, 19 nt, Artificial Sequence
  Synthetic
ugaacaaucccgaagagau

SEQ ID NO: 4808 - RNA, 19 nt, Artificial Sequence
  Synthetic
caagauaccucucgcaugu

SEQ ID NO: 4809 - RNA, 19 nt, Artificial Sequence
  Synthetic
ggaaagcgauggugaaagc

SEQ ID NO: 4810 - RNA, 19 nt, Artificial Sequence
  Synthetic
gagagcggaaagugaguau

SEQ ID NO: 4811 - RNA, 19 nt, Artificial Sequence
  Synthetic
gcugugaagggcagacaau

SEQ ID NO: 4812 - RNA, 19 nt, Artificial Sequence
  Synthetic
aguuugagcuucagggaaa

SEQ ID NO: 4813 - RNA, 19 nt, Artificial Sequence
  Synthetic
gggagaggaaggugaguau

SEQ ID NO: 4814 - RNA, 19 nt, Artificial Sequence
  Synthetic
ggaggagaaucaagaguga

SEQ ID NO: 4815 - RNA, 19 nt, Artificial Sequence
  Synthetic
gcaccugggcauugagcaa

SEQ ID NO: 4816 - RNA, 19 nt, Artificial Sequence
  Synthetic
ccaccaagcgccagaagua

SEQ ID NO: 4817 - RNA, 19 nt, Artificial Sequence
  Synthetic
ccaucaagcuggagugugu

SEQ ID NO: 4818 - RNA, 19 nt, Artificial Sequence
  Synthetic
gagcaaagccgucgagaug

SEQ ID NO: 4819 - RNA, 19 nt, Artificial Sequence
  Synthetic
uggagugugugaagacaaa

SEQ ID NO: 4820 - RNA, 19 nt, Artificial Sequence
  Synthetic
gagaggaaggugaguauga

SEQ ID NO: 4821 - RNA, 19 nt, Artificial Sequence
  Synthetic
gagaugaccuggagagccu

SEQ ID NO: 4822 - RNA, 19 nt, Artificial Sequence
  Synthetic
caucacaguuugagcuuca

SEQ ID NO: 4823 - RNA, 19 nt, Artificial Sequence
  Synthetic
gugaggaagucgccaucaa

SEQ ID NO: 4824 - RNA, 19 nt, Artificial Sequence
  Synthetic
ccuccgaauucucaacaua

SEQ ID NO: 4825 - RNA, 19 nt, Artificial Sequence
  Synthetic
acuggaacaugcugaaauu

SEQ ID NO: 4826 - RNA, 19 nt, Artificial Sequence
  Synthetic
gagcugagggcgacuacaa

SEQ ID NO: 4827 - RNA, 19 nt, Artificial Sequence
  Synthetic
agagcaaguucuacaagau

SEQ ID NO: 4828 - RNA, 19 nt, Artificial Sequence
  Synthetic
ggaucagcgagaagaagau

SEQ ID NO: 4829 - RNA, 19 nt, Artificial Sequence
  Synthetic
cggaucagcgagaagaaga

SEQ ID NO: 4830 - RNA, 19 nt, Artificial Sequence
  Synthetic
acuacaacgugauggucau

SEQ ID NO: 4831 - RNA, 19 nt, Artificial Sequence
  Synthetic
gagagcaaguucuacaaga

SEQ ID NO: 4832 - RNA, 19 nt, Artificial Sequence
  Synthetic
gcuacgugcucauguacuu

SEQ ID NO: 4833 - RNA, 19 nt, Artificial Sequence
  Synthetic
cuggagugugugaagacaa

SEQ ID NO: 4834 - RNA, 19 nt, Artificial Sequence
  Synthetic
ggcaagaggucucccggau

SEQ ID NO: 4835 - RNA, 19 nt, Artificial Sequence
  Synthetic
gaucagccgcaucgaguau

SEQ ID NO: 4836 - RNA, 19 nt, Artificial Sequence
  Synthetic
gcaaagccgucgagaugac

SEQ ID NO: 4837 - RNA, 19 nt, Artificial Sequence
  Synthetic
agagugagccauggagcua

SEQ ID NO: 4838 - RNA, 19 nt, Artificial Sequence
  Synthetic
gaucccagccucacagaca

SEQ ID NO: 4839 - RNA, 19 nt, Artificial Sequence
  Synthetic
ucgaggaccuguucaacuu

SEQ ID NO: 4840 - RNA, 19 nt, Artificial Sequence
  Synthetic
gcaaccuggucuacaucau

SEQ ID NO: 4841 - RNA, 19 nt, Artificial Sequence
  Synthetic
agcaaguucuacaagauga

SEQ ID NO: 4842 - RNA, 19 nt, Artificial Sequence
  Synthetic
cgagaaagccacacacaua

SEQ ID NO: 4843 - RNA, 19 nt, Artificial Sequence
  Synthetic
gagcaaagccggagagaug

SEQ ID NO: 4844 - RNA, 19 nt, Artificial Sequence
  Synthetic
gggaaaaggaugaaagaca

SEQ ID NO: 4845 - RNA, 19 nt, Artificial Sequence
  Synthetic
cagaauaguagcagaugua

SEQ ID NO: 4846 - RNA, 19 nt, Artificial Sequence
  Synthetic
gaauaguagcagauguaaa

SEQ ID NO: 4847 - RNA, 19 nt, Artificial Sequence
  Synthetic
ggaaaaggaugaaagacaa

SEQ ID NO: 4848 - RNA, 19 nt, Artificial Sequence
  Synthetic
acacauaccuuauagggaa

SEQ ID NO: 4849 - RNA, 19 nt, Artificial Sequence
  Synthetic
gaugaaagacaacggacaa

SEQ ID NO: 4850 - RNA, 19 nt, Artificial Sequence
  Synthetic
gaagauaggaugugggaac

SEQ ID NO: 4851 - RNA, 19 nt, Artificial Sequence
  Synthetic
ucgacaaggcaauaagaaa

SEQ ID NO: 4852 - RNA, 19 nt, Artificial Sequence
  Synthetic
cuuuggaccaugugggaaa

SEQ ID NO: 4853 - RNA, 19 nt, Artificial Sequence
  Synthetic
ggaugaaagacaacggaca

SEQ ID NO: 4854 - RNA, 19 nt, Artificial Sequence
  Synthetic
caaucaaacuggaaccaau

SEQ ID NO: 4855 - RNA, 19 nt, Artificial Sequence
  Synthetic
gcaauaagaaagagcaugu

SEQ ID NO: 4856 - RNA, 19 nt, Artificial Sequence
  Synthetic
ggaccaugugggaaauaua

SEQ ID NO: 4857 - RNA, 19 nt, Artificial Sequence
  Synthetic
uggaauacgugcacucaaa

SEQ ID NO: 4858 - RNA, 19 nt, Artificial Sequence
  Synthetic
caacacgcaucuuggcaaa

SEQ ID NO: 4859 - RNA, 19 nt, Artificial Sequence
  Synthetic
cuucgaaaucagagccuua

SEQ ID NO: 4860 - RNA, 19 nt, Artificial Sequence
  Synthetic
caacuaaacccauggcaca

SEQ ID NO: 4861 - RNA, 19 nt, Artificial Sequence
  Synthetic
gagcaagaucagaauagua

SEQ ID NO: 4862 - RNA, 19 nt, Artificial Sequence
  Synthetic
acucaaagaaccucauuua

SEQ ID NO: 4863 - RNA, 19 nt, Artificial Sequence
  Synthetic
agaaagagcauguuauaca

SEQ ID NO: 4864 - RNA, 19 nt, Artificial Sequence
  Synthetic
cgacuggacuucuuugaaa

SEQ ID NO: 4865 - RNA, 19 nt, Artificial Sequence
  Synthetic
gaucagaauaguagcagau

SEQ ID NO: 4866 - RNA, 19 nt, Artificial Sequence
  Synthetic
ucacagaccucuuugaaaa

SEQ ID NO: 4867 - RNA, 19 nt, Artificial Sequence
  Synthetic
ggcaaggacucaaggcuga

SEQ ID NO: 4868 - RNA, 19 nt, Artificial Sequence
  Synthetic
gggaagaggcaccuaaaca

SEQ ID NO: 4869 - RNA, 19 nt, Artificial Sequence
  Synthetic
acucaaggcugacacauua

SEQ ID NO: 4870 - RNA, 19 nt, Artificial Sequence
  Synthetic
ggccauauguucauguauu

SEQ ID NO: 4871 - RNA, 19 nt, Artificial Sequence
  Synthetic
ggacaaaagucacauauga

SEQ ID NO: 4872 - RNA, 19 nt, Artificial Sequence
  Synthetic
ugacaagaaaggagggaaa

SEQ ID NO: 4873 - RNA, 19 nt, Artificial Sequence
  Synthetic
gcaagcagccggagacaaa

SEQ ID NO: 4874 - RNA, 19 nt, Artificial Sequence
  Synthetic
ccuugaagccauagaauuu

SEQ ID NO: 4875 - RNA, 19 nt, Artificial Sequence
  Synthetic
ggaaagaaucucuauacaa

SEQ ID NO: 4876 - RNA, 19 nt, Artificial Sequence
  Synthetic
ucaagaggagaaagagaaa

SEQ ID NO: 4877 - RNA, 19 nt, Artificial Sequence
  Synthetic
acgugaagcccgagaacuu

SEQ ID NO: 4878 - RNA, 19 nt, Artificial Sequence
  Synthetic
caaaugaauacguggcuau

SEQ ID NO: 4879 - RNA, 19 nt, Artificial Sequence
  Synthetic
cuucaagaggagaaagaga

SEQ ID NO: 4880 - RNA, 19 nt, Artificial Sequence
  Synthetic
gugcacaccaagagccuaa

SEQ ID NO: 4881 - RNA, 19 nt, Artificial Sequence
  Synthetic
augaauacguggcuaucaa

SEQ ID NO: 4882 - RNA, 19 nt, Artificial Sequence
  Synthetic
uuuaccaaguguacagaaa

SEQ ID NO: 4883 - RNA, 19 nt, Artificial Sequence
  Synthetic
ucaaauuggagccgaucaa

SEQ ID NO: 4884 - RNA, 19 nt, Artificial Sequence
  Synthetic
cuaucaaauuggagccgau

SEQ ID NO: 4885 - RNA, 19 nt, Artificial Sequence
  Synthetic
gcccagcccugcagguaua

SEQ ID NO: 4886 - RNA, 19 nt, Artificial Sequence
  Synthetic
aggaaagaaucucuauaca

SEQ ID NO: 4887 - RNA, 19 nt, Artificial Sequence
  Synthetic
aagaggagaaagagaaaau

SEQ ID NO: 4888 - RNA, 19 nt, Artificial Sequence
  Synthetic
gcugaagugaguaguguga

SEQ ID NO: 4889 - RNA, 19 nt, Artificial Sequence
  Synthetic
uguaagacuuuggccgaaa

SEQ ID NO: 4890 - RNA, 19 nt, Artificial Sequence
  Synthetic
ucgagaagcccgacuauga

SEQ ID NO: 4891 - RNA, 19 nt, Artificial Sequence
  Synthetic
agguggagguggccgauga

SEQ ID NO: 4892 - RNA, 19 nt, Artificial Sequence
  Synthetic
cagaggagauggccacgua

SEQ ID NO: 4893 - RNA, 19 nt, Artificial Sequence
  Synthetic
uggaguaugugcacaccaa

SEQ ID NO: 4894 - RNA, 19 nt, Artificial Sequence
  Synthetic
ccaagaagcacaucccgua

SEQ ID NO: 4895 - RNA, 19 nt, Artificial Sequence
  Synthetic
agaacuucccagaggagau

SEQ ID NO: 4896 - RNA, 19 nt, Artificial Sequence
  Synthetic
ccuccaagagcauuaacua

SEQ ID NO: 4897 - RNA, 19 nt, Artificial Sequence
  Synthetic
ccaagagcauuaacuauuu

SEQ ID NO: 4898 - RNA, 19 nt, Artificial Sequence
  Synthetic
cacaagagccugacgggca

SEQ ID NO: 4899 - RNA, 19 nt, Artificial Sequence
  Synthetic
ucaacacgcaccugggcaa

SEQ ID NO: 4900 - RNA, 19 nt, Artificial Sequence
  Synthetic
ugaagugaguagugugauc

SEQ ID NO: 4901 - RNA, 19 nt, Artificial Sequence
  Synthetic
acaccaagagccuaaucua

SEQ ID NO: 4902 - RNA, 19 nt, Artificial Sequence
  Synthetic
agaauuacgauuagggaaa

SEQ ID NO: 4903 - RNA, 19 nt, Artificial Sequence
  Synthetic
gcacaucaacacagagaua

SEQ ID NO: 4904 - RNA, 19 nt, Artificial Sequence
  Synthetic
gcuuaaaggcugacacauu

SEQ ID NO: 4905 - RNA, 19 nt, Artificial Sequence
  Synthetic
cuacaaauggagaguuaaa

SEQ ID NO: 4906 - RNA, 19 nt, Artificial Sequence
  Synthetic
gcccagagguacugaggaa

SEQ ID NO: 4907 - RNA, 19 nt, Artificial Sequence
  Synthetic
acacauuaaaggagaggua

SEQ ID NO: 4908 - RNA, 19 nt, Artificial Sequence
  Synthetic
gagcauaaucaaacaggaa

SEQ ID NO: 4909 - RNA, 19 nt, Artificial Sequence
  Synthetic
ggacacaacacucgaggaa

SEQ ID NO: 4910 - RNA, 19 nt, Artificial Sequence
  Synthetic
gaauaugacuggauuggua

SEQ ID NO: 4911 - RNA, 19 nt, Artificial Sequence
  Synthetic
aaguagaagugauggauga

SEQ ID NO: 4912 - RNA, 19 nt, Artificial Sequence
  Synthetic
guagaaagcaguacaguau

SEQ ID NO: 4913 - RNA, 19 nt, Artificial Sequence
  Synthetic
ggucauauguucauguauu

SEQ ID NO: 4914 - RNA, 19 nt, Artificial Sequence
  Synthetic
aaacagaguugcccaaaua

SEQ ID NO: 4915 - RNA, 19 nt, Artificial Sequence
  Synthetic
caauagaaguguuauguga

SEQ ID NO: 4916 - RNA, 19 nt, Artificial Sequence
  Synthetic
aaacgaaggaaaaggaaaa

SEQ ID NO: 4917 - RNA, 19 nt, Artificial Sequence
  Synthetic
uguaagaaggcuagauuuu

SEQ ID NO: 4918 - RNA, 19 nt, Artificial Sequence
  Synthetic
caaaugaauauguggcaau

SEQ ID NO: 4919 - RNA, 19 nt, Artificial Sequence
  Synthetic
ccgcaaacuugauauggaa

SEQ ID NO: 4920 - RNA, 19 nt, Artificial Sequence
  Synthetic
gaaacuuacugcugaauga

SEQ ID NO: 4921 - RNA, 19 nt, Artificial Sequence
  Synthetic
acacaacacucgaggaacu

SEQ ID NO: 4922 - RNA, 19 nt, Artificial Sequence
  Synthetic
caauuaaguuggagcccau

SEQ ID NO: 4923 - RNA, 19 nt, Artificial Sequence
  Synthetic
gguggaagccuaaagaaau

SEQ ID NO: 4924 - RNA, 19 nt, Artificial Sequence
  Synthetic
cuuaaaggcugacacauua

SEQ ID NO: 4925 - RNA, 19 nt, Artificial Sequence
  Synthetic
caaagaaacacauaccaua

SEQ ID NO: 4926 - RNA, 19 nt, Artificial Sequence
  Synthetic
gagaauuacgauuagggaa

SEQ ID NO: 4927 - RNA, 19 nt, Artificial Sequence
  Synthetic
auauugauccggagacaaa

SEQ ID NO: 4928 - RNA, 19 nt, Artificial Sequence
  Synthetic
cuuaauaggacgaccaaga

SEQ ID NO: 4929 - RNA, 19 nt, Artificial Sequence
  Synthetic
aaguagaagagacgauuua

SEQ ID NO: 4930 - RNA, 19 nt, Artificial Sequence
  Synthetic
ggaaaagaacaaaguagaa

SEQ ID NO: 4931 - RNA, 19 nt, Artificial Sequence
  Synthetic
ccaaugaggugguaucaau

SEQ ID NO: 4932 - RNA, 19 nt, Artificial Sequence
  Synthetic
cuucaaagguccugagcua

SEQ ID NO: 4933 - RNA, 19 nt, Artificial Sequence
  Synthetic
uggacaaacugcugcgaua

SEQ ID NO: 4934 - RNA, 19 nt, Artificial Sequence
  Synthetic
uggaauauuucauggacaa

SEQ ID NO: 4935 - RNA, 19 nt, Artificial Sequence
  Synthetic
agguaaauacagugaagua

SEQ ID NO: 4936 - RNA, 19 nt, Artificial Sequence
  Synthetic
acacagacuucaagcaauu

SEQ ID NO: 4937 - RNA, 19 nt, Artificial Sequence
  Synthetic
gcacagaaagcuacgacua

SEQ ID NO: 4938 - RNA, 19 nt, Artificial Sequence
  Synthetic
acacagaccucgagaauac

SEQ ID NO: 4939 - RNA, 19 nt, Artificial Sequence
  Synthetic
aaaauuaggccgagguaaa

SEQ ID NO: 4940 - RNA, 19 nt, Artificial Sequence
  Synthetic
ggacagaagauuuauauga

SEQ ID NO: 4941 - RNA, 19 nt, Artificial Sequence
  Synthetic
cagaaagcuacgacuaaua

SEQ ID NO: 4942 - RNA, 19 nt, Artificial Sequence
  Synthetic
gcauuuagguggagacuuc

SEQ ID NO: 4943 - RNA, 19 nt, Artificial Sequence
  Synthetic
gaagaaaacaggucugaaa

SEQ ID NO: 4944 - RNA, 19 nt, Artificial Sequence
  Synthetic
ccuaguggcucuuguggaa

SEQ ID NO: 4945 - RNA, 19 nt, Artificial Sequence
  Synthetic
ccaucaacaucacaaauaa

SEQ ID NO: 4946 - RNA, 19 nt, Artificial Sequence
  Synthetic
ggaaggaaggaaagaagga

SEQ ID NO: 4947 - RNA, 19 nt, Artificial Sequence
  Synthetic
gaagaaaggaaggaaggaa

SEQ ID NO: 4948 - RNA, 19 nt, Artificial Sequence
  Synthetic
acacacagaccucgagaau

SEQ ID NO: 4949 - RNA, 19 nt, Artificial Sequence
  Synthetic
gaguuuacacagauguuaa

SEQ ID NO: 4950 - RNA, 19 nt, Artificial Sequence
  Synthetic
ccuuggauuuccuggacaa

SEQ ID NO: 4951 - RNA, 19 nt, Artificial Sequence
  Synthetic
acuaucagauguacgauua

SEQ ID NO: 4952 - RNA, 19 nt, Artificial Sequence
  Synthetic
caauuguaccagacguuaa

SEQ ID NO: 4953 - RNA, 19 nt, Artificial Sequence
  Synthetic
gggccagaguuuacacaga

SEQ ID NO: 4954 - RNA, 19 nt, Artificial Sequence
  Synthetic
agaagaaaauuaagcguga

SEQ ID NO: 4955 - RNA, 19 nt, Artificial Sequence
  Synthetic
ggaauuaugcacagagaug

SEQ ID NO: 4956 - RNA, 19 nt, Artificial Sequence
  Synthetic
gcccugaggccuuggauuu

SEQ ID NO: 4957 - RNA, 19 nt, Artificial Sequence
  Synthetic
acacagauguuaauacaca

SEQ ID NO: 4958 - RNA, 19 nt, Artificial Sequence
  Synthetic
ccaagcagggccagaguuu

SEQ ID NO: 4959 - RNA, 19 nt, Artificial Sequence
  Synthetic
caacacagacuucaagcaa

SEQ ID NO: 4960 - RNA, 19 nt, Artificial Sequence
  Synthetic
gugaaguauuugaagccau

SEQ ID NO: 4961 - RNA, 19 nt, Artificial Sequence
  Synthetic
caacauugaauuagaucca

SEQ ID NO: 4962 - RNA, 19 nt, Artificial Sequence
  Synthetic
gggaaaauauagugaagua

SEQ ID NO: 4963 - RNA, 19 nt, Artificial Sequence
  Synthetic
cagaagaacuguaugggua

SEQ ID NO: 4964 - RNA, 19 nt, Artificial Sequence
  Synthetic
gggacaacauucacggaaa

SEQ ID NO: 4965 - RNA, 19 nt, Artificial Sequence
  Synthetic
uggacaaacuucugcgaua

SEQ ID NO: 4966 - RNA, 19 nt, Artificial Sequence
  Synthetic
agauaaaacgagagguuaa

SEQ ID NO: 4967 - RNA, 19 nt, Artificial Sequence
  Synthetic
ucacggaaacgcugggaaa

SEQ ID NO: 4968 - RNA, 19 nt, Artificial Sequence
  Synthetic
ccaaagaggccauggagca

SEQ ID NO: 4969 - RNA, 19 nt, Artificial Sequence
  Synthetic
gaacaagaaccaaaucaaa

SEQ ID NO: 4970 - RNA, 19 nt, Artificial Sequence
  Synthetic
aagcagaacaagaaccaaa

SEQ ID NO: 4971 - RNA, 19 nt, Artificial Sequence
  Synthetic
gaaccuucgugguggaaca

SEQ ID NO: 4972 - RNA, 19 nt, Artificial Sequence
  Synthetic
gggucuacgccgaggugaa

SEQ ID NO: 4973 - RNA, 19 nt, Artificial Sequence
  Synthetic
gugaaguauuugaggccau

SEQ ID NO: 4974 - RNA, 19 nt, Artificial Sequence
  Synthetic
cccuagaucuucuggacaa

SEQ ID NO: 4975 - RNA, 19 nt, Artificial Sequence
  Synthetic
cagcaaaccacgcuaacua

SEQ ID NO: 4976 - RNA, 19 nt, Artificial Sequence
  Synthetic
gauagaucaccaacagaaa

SEQ ID NO: 4977 - RNA, 19 nt, Artificial Sequence
  Synthetic
gaagauaaaacgagagguu

SEQ ID NO: 4978 - RNA, 19 nt, Artificial Sequence
  Synthetic
ucacauagaccuagaucca

SEQ ID NO: 4979 - RNA, 19 nt, Artificial Sequence
  Synthetic
augagagagugguuguaaa

SEQ ID NO: 4980 - RNA, 19 nt, Artificial Sequence
  Synthetic
gauccacacuucaacgaua

SEQ ID NO: 4981 - RNA, 19 nt, Artificial Sequence
  Synthetic
caacaaugagagagugguu

SEQ ID NO: 4982 - RNA, 19 nt, Artificial Sequence
  Synthetic
gaguuugggcuguauguua

SEQ ID NO: 4983 - RNA, 19 nt, Artificial Sequence
  Synthetic
agaagaacuguauggguau

SEQ ID NO: 4984 - RNA, 19 nt, Artificial Sequence
  Synthetic
agaacaagaaccaaaucaa

SEQ ID NO: 4985 - RNA, 19 nt, Artificial Sequence
  Synthetic
ugcagaauguuguugguua

SEQ ID NO: 4986 - RNA, 19 nt, Artificial Sequence
  Synthetic
gcacgaugaagacuggaaa

SEQ ID NO: 4987 - RNA, 19 nt, Artificial Sequence
  Synthetic
gcagaauguuguugguuac

SEQ ID NO: 4988 - RNA, 19 nt, Artificial Sequence
  Synthetic
ccauuaauaucaccaacaa

SEQ ID NO: 4989 - RNA, 19 nt, Artificial Sequence
  Synthetic
ggacaacauucacggaaac

SEQ ID NO: 4990 - RNA, 19 nt, Artificial Sequence
  Synthetic
ucaacgauauccugggaca

SEQ ID NO: 4991 - RNA, 19 nt, Artificial Sequence
  Synthetic
caacagagacugacugcca

SEQ ID NO: 4992 - RNA, 19 nt, Artificial Sequence
  Synthetic
augaagaacuggaagacaa

SEQ ID NO: 4993 - RNA, 19 nt, Artificial Sequence
  Synthetic
ccgagaugcuuuauggauu

SEQ ID NO: 4994 - RNA, 19 nt, Artificial Sequence
  Synthetic
gugaaguggaugaagacua

SEQ ID NO: 4995 - RNA, 19 nt, Artificial Sequence
  Synthetic
aagacuacauccaggacaa

SEQ ID NO: 4996 - RNA, 19 nt, Artificial Sequence
  Synthetic
ggugggaauaugaaauaaa

SEQ ID NO: 4997 - RNA, 19 nt, Artificial Sequence
  Synthetic
ccgacaagcucuagacaug

SEQ ID NO: 4998 - RNA, 19 nt, Artificial Sequence
  Synthetic
gcaaugaauucuucuguga

SEQ ID NO: 4999 - RNA, 19 nt, Artificial Sequence
  Synthetic
cugaugaagaacuggaaga

SEQ ID NO: 5000 - RNA, 19 nt, Artificial Sequence
  Synthetic
ccuggagccugaugaagaa

SEQ ID NO: 5001 - RNA, 19 nt, Artificial Sequence
  Synthetic
guggugggaauaugaaaua

SEQ ID NO: 5002 - RNA, 19 nt, Artificial Sequence
  Synthetic
ucugugaaguggaugaaga

SEQ ID NO: 5003 - RNA, 19 nt, Artificial Sequence
  Synthetic
caggugaagccauggugaa

SEQ ID NO: 5004 - RNA, 19 nt, Artificial Sequence
  Synthetic
ccaagugcauggaugugua

SEQ ID NO: 5005 - RNA, 19 nt, Artificial Sequence
  Synthetic
aagccauggugaagcucua

SEQ ID NO: 5006 - RNA, 19 nt, Artificial Sequence
  Synthetic
agcaaggagacuuugguua

SEQ ID NO: 5007 - RNA, 19 nt, Artificial Sequence
  Synthetic
gcaaggagacuuugguuac

SEQ ID NO: 5008 - RNA, 19 nt, Artificial Sequence
  Synthetic
guaccagcaaggagacuuu

SEQ ID NO: 5009 - RNA, 19 nt, Artificial Sequence
  Synthetic
ggaccuggagccugaugaa

SEQ ID NO: 5010 - RNA, 19 nt, Artificial Sequence
  Synthetic
ucgcccagauguuggaaaa

SEQ ID NO: 5011 - RNA, 19 nt, Artificial Sequence
  Synthetic
ccucguguguacugugaga

SEQ ID NO: 5012 - RNA, 19 nt, Artificial Sequence
  Synthetic
cgagaugcuuuauggauug

SEQ ID NO: 5013 - RNA, 19 nt, Artificial Sequence
  Synthetic
caaccagagugaccugauu

SEQ ID NO: 5014 - RNA, 19 nt, Artificial Sequence
  Synthetic
gaugaagaacuggaagaca

SEQ ID NO: 5015 - RNA, 19 nt, Artificial Sequence
  Synthetic
gggauugguaguucgcuuu

SEQ ID NO: 5016 - RNA, 19 nt, Artificial Sequence
  Synthetic
uuaaaggagucguuauugu

SEQ ID NO: 5017 - RNA, 19 nt, Artificial Sequence
  Synthetic
ugcccaggcucuacgguuu

SEQ ID NO: 5018 - RNA, 19 nt, Artificial Sequence
  Synthetic
ccaagagaccugccaacca

SEQ ID NO: 5019 - RNA, 19 nt, Artificial Sequence
  Synthetic
uaaucuuacuggacucaau

SEQ ID NO: 5020 - RNA, 19 nt, Artificial Sequence
  Synthetic
ugaaguggaugaagacuac

SEQ ID NO: 5021 - RNA, 19 nt, Artificial Sequence
  Synthetic
caaugaauucuucugugaa

SEQ ID NO: 5022 - RNA, 19 nt, Artificial Sequence
  Synthetic
gaagaaaugccgugagaaa

SEQ ID NO: 5023 - RNA, 19 nt, Artificial Sequence
  Synthetic
caguaaacauggagaaauu

SEQ ID NO: 5024 - RNA, 19 nt, Artificial Sequence
  Synthetic
ugacacaguuguaggguua

SEQ ID NO: 5025 - RNA, 19 nt, Artificial Sequence
  Synthetic
gaaucgauguccaggauaa

SEQ ID NO: 5026 - RNA, 19 nt, Artificial Sequence
  Synthetic
gcaagaaacguuagcaaau

SEQ ID NO: 5027 - RNA, 19 nt, Artificial Sequence
  Synthetic
gcacaaacguccuggggaa

SEQ ID NO: 5028 - RNA, 19 nt, Artificial Sequence
  Synthetic
ccaaagaagagaaugacaa

SEQ ID NO: 5029 - RNA, 19 nt, Artificial Sequence
  Synthetic
ggacaaaggaagaagaaac

SEQ ID NO: 5030 - RNA, 19 nt, Artificial Sequence
  Synthetic
gauccaaagaagagaauga

SEQ ID NO: 5031 - RNA, 19 nt, Artificial Sequence
  Synthetic
aggaaaacguggaugauua

SEQ ID NO: 5032 - RNA, 19 nt, Artificial Sequence
  Synthetic
cugaaagagauuaggaaca

SEQ ID NO: 5033 - RNA, 19 nt, Artificial Sequence
  Synthetic
gaucaagccuaaagauaca

SEQ ID NO: 5034 - RNA, 19 nt, Artificial Sequence
  Synthetic
gcaaaguacaacaccaaua

SEQ ID NO: 5035 - RNA, 19 nt, Artificial Sequence
  Synthetic
cgaaaucaucugcaagaaa

SEQ ID NO: 5036 - RNA, 19 nt, Artificial Sequence
  Synthetic
ccgcagaccuuuugcugaa

SEQ ID NO: 5037 - RNA, 19 nt, Artificial Sequence
  Synthetic
cgacaaggacggacacauu

SEQ ID NO: 5038 - RNA, 19 nt, Artificial Sequence
  Synthetic
acuacgaauuugaggauga

SEQ ID NO: 5039 - RNA, 19 nt, Artificial Sequence
  Synthetic
uggagaaauucaagaaguu

SEQ ID NO: 5040 - RNA, 19 nt, Artificial Sequence
  Synthetic
gugaagaaaugccgugaga

SEQ ID NO: 5041 - RNA, 19 nt, Artificial Sequence
  Synthetic
caucaagaaccgagaagga

SEQ ID NO: 5042 - RNA, 19 nt, Artificial Sequence
  Synthetic
aaaucaaccuggauggcaa

SEQ ID NO: 5043 - RNA, 19 nt, Artificial Sequence
  Synthetic
acgaauuugaggaugaaua

SEQ ID NO: 5044 - RNA, 19 nt, Artificial Sequence
  Synthetic
cggaaagacggcagaagau

SEQ ID NO: 5045 - RNA, 19 nt, Artificial Sequence
  Synthetic
gguagaagguugacacagu

SEQ ID NO: 5046 - RNA, 19 nt, Artificial Sequence
  Synthetic
gaucaguguuguugcucua

SEQ ID NO: 5047 - RNA, 19 nt, Artificial Sequence
  Synthetic
ccuaugagauccagcugaa

SEQ ID NO: 5048 - RNA, 19 nt, Artificial Sequence
  Synthetic
guuugucgcuccugagaua

SEQ ID NO: 5049 - RNA, 19 nt, Artificial Sequence
  Synthetic
agaaauacgaagccagauu

SEQ ID NO: 5050 - RNA, 19 nt, Artificial Sequence
  Synthetic
caguaauaccagugcccua

SEQ ID NO: 5051 - RNA, 19 nt, Artificial Sequence
  Synthetic
gcuauuacucuguggccaa

SEQ ID NO: 5052 - RNA, 19 nt, Artificial Sequence
  Synthetic
gggaauagccaucgacaaa

SEQ ID NO: 5053 - RNA, 19 nt, Artificial Sequence
  Synthetic
gugaagaagugccgggaga

SEQ ID NO: 5054 - RNA, 19 nt, Artificial Sequence
  Synthetic
cgaaauagaagauggaguu

SEQ ID NO: 5055 - RNA, 19 nt, Artificial Sequence
  Synthetic
cuccagaaauugugaacua

SEQ ID NO: 5056 - RNA, 19 nt, Artificial Sequence
  Synthetic
gaggagagcucuucgauuu

SEQ ID NO: 5057 - RNA, 19 nt, Artificial Sequence
  Synthetic
cggaugaggaccugaggaa

SEQ ID NO: 5058 - RNA, 19 nt, Artificial Sequence
  Synthetic
gguuaaagagacccggaaa

SEQ ID NO: 5059 - RNA, 19 nt, Artificial Sequence
  Synthetic
gaacagggugauugaggaa

SEQ ID NO: 5060 - RNA, 19 nt, Artificial Sequence
  Synthetic
aauagaagauggaguugaa

SEQ ID NO: 5061 - RNA, 19 nt, Artificial Sequence
  Synthetic
gcucuuaauucuccauaaa

SEQ ID NO: 5062 - RNA, 19 nt, Artificial Sequence
  Synthetic
ggaucacgccgguggacaa

SEQ ID NO: 5063 - RNA, 19 nt, Artificial Sequence
  Synthetic
agcagaagguggaggacuu

SEQ ID NO: 5064 - RNA, 19 nt, Artificial Sequence
  Synthetic
gagaugggcccaaggaauu

SEQ ID NO: 5065 - RNA, 19 nt, Artificial Sequence
  Synthetic
agaagauggaguugaauuu

SEQ ID NO: 5066 - RNA, 19 nt, Artificial Sequence
  Synthetic
gcagggagucuguggucaa

SEQ ID NO: 5067 - RNA, 19 nt, Artificial Sequence
  Synthetic
ggaguguggacuuaggaaa

SEQ ID NO: 5068 - RNA, 19 nt, Artificial Sequence
  Synthetic
ggagacacgaagcaggaaa

SEQ ID NO: 5069 - RNA, 19 nt, Artificial Sequence
  Synthetic
ggacaucgccaggaggaaa

SEQ ID NO: 5070 - RNA, 19 nt, Artificial Sequence
  Synthetic
uggucaaucuggagaacuu

SEQ ID NO: 5071 - RNA, 19 nt, Artificial Sequence
  Synthetic
aggaaacacuggcaaauau

SEQ ID NO: 5072 - RNA, 19 nt, Artificial Sequence
  Synthetic
uggucuggcucacgaaaua

SEQ ID NO: 5073 - RNA, 19 nt, Artificial Sequence
  Synthetic
gagauggggucuuuagaaa

SEQ ID NO: 5074 - RNA, 19 nt, Artificial Sequence
  Synthetic
gagagagaccauauccaaa

SEQ ID NO: 5075 - RNA, 19 nt, Artificial Sequence
  Synthetic
gggcagaaucucagaaggu

SEQ ID NO: 5076 - RNA, 19 nt, Artificial Sequence
  Synthetic
ggaauuuguugcuccagaa

SEQ ID NO: 5077 - RNA, 19 nt, Artificial Sequence
  Synthetic
agacaagaauauucccauu

SEQ ID NO: 5078 - RNA, 19 nt, Artificial Sequence
  Synthetic
gaugaggaccugaggaacu

SEQ ID NO: 5079 - RNA, 19 nt, Artificial Sequence
  Synthetic
ugacagagagagaccauau

SEQ ID NO: 5080 - RNA, 19 nt, Artificial Sequence
  Synthetic
gcacuuugcaagagagaug

SEQ ID NO: 5081 - RNA, 19 nt, Artificial Sequence
  Synthetic
acgacaucuucgagaacaa

SEQ ID NO: 5082 - RNA, 19 nt, Artificial Sequence
  Synthetic
gaggaguacuucagcaaca

SEQ ID NO: 5083 - RNA, 19 nt, Artificial Sequence
  Synthetic
cagccaaguucaucaagaa

SEQ ID NO: 5084 - RNA, 19 nt, Artificial Sequence
  Synthetic
acaucaugcugcuggacaa

SEQ ID NO: 5085 - RNA, 19 nt, Artificial Sequence
  Synthetic
gaaucaagcucaucgacuu

SEQ ID NO: 5086 - RNA, 19 nt, Artificial Sequence
  Synthetic
ccccagagauugugaacua

SEQ ID NO: 5087 - RNA, 19 nt, Artificial Sequence
  Synthetic
aggaggacguggaggacca

SEQ ID NO: 5088 - RNA, 19 nt, Artificial Sequence
  Synthetic
gaucccaagcggagaauga

SEQ ID NO: 5089 - RNA, 19 nt, Artificial Sequence
  Synthetic
aggagaagcugcagggcgu

SEQ ID NO: 5090 - RNA, 19 nt, Artificial Sequence
  Synthetic
agaucgagcgggaggugaa

SEQ ID NO: 5091 - RNA, 19 nt, Artificial Sequence
  Synthetic
ccgccaucuacgaggagaa

SEQ ID NO: 5092 - RNA, 19 nt, Artificial Sequence
  Synthetic
gugaacauccugcgggaga

SEQ ID NO: 5093 - RNA, 19 nt, Artificial Sequence
  Synthetic
uggacaagaacgugcccaa

SEQ ID NO: 5094 - RNA, 19 nt, Artificial Sequence
  Synthetic
agaaagagucgcugacgga

SEQ ID NO: 5095 - RNA, 19 nt, Artificial Sequence
  Synthetic
ccaucuacgaggagaagga

SEQ ID NO: 5096 - RNA, 19 nt, Artificial Sequence
  Synthetic
gcaaggaguacgcagccaa

SEQ ID NO: 5097 - RNA, 19 nt, Artificial Sequence
  Synthetic
ccacgcgucugaaggagua

SEQ ID NO: 5098 - RNA, 19 nt, Artificial Sequence
  Synthetic
gcaaguagccuccgagaug

SEQ ID NO: 5099 - RNA, 19 nt, Artificial Sequence
  Synthetic
acgacuucgacgaggagua

SEQ ID NO: 5100 - RNA, 19 nt, Artificial Sequence
  Synthetic
acgaggaguacuucagcaa

SEQ ID NO: 5101 - RNA, 19 nt, Artificial Sequence
  Synthetic
cugaaggaguacaccauca

SEQ ID NO: 5102 - RNA, 19 nt, Artificial Sequence
  Synthetic
acgccgacuucgagcgcuu

SEQ ID NO: 5103 - RNA, 19 nt, Artificial Sequence
  Synthetic
aggacguggaggaccauua

SEQ ID NO: 5104 - RNA, 19 nt, Artificial Sequence
  Synthetic
acaucucagccgugaacua

SEQ ID NO: 5105 - RNA, 19 nt, Artificial Sequence
  Synthetic
aggagaaggaggccuggua

SEQ ID NO: 5106 - RNA, 19 nt, Artificial Sequence
  Synthetic
ucaugcugcuggacaagaa

SEQ ID NO: 5107 - RNA, 19 nt, Artificial Sequence
  Synthetic
cagagauugugaacuauga

SEQ ID NO: 5108 - RNA, 19 nt, Artificial Sequence
  Synthetic
gcagccaaguucaucaaga

SEQ ID NO: 5109 - RNA, 19 nt, Artificial Sequence
  Synthetic
caggagacgcucaccaaca

SEQ ID NO: 5110 - RNA, 19 nt, Artificial Sequence
  Synthetic
guggaggaccauuaugaga

SEQ ID NO: 5111 - RNA, 19 nt, Artificial Sequence
  Synthetic
gggauaaggcgcagagaua

SEQ ID NO: 5112 - RNA, 19 nt, Artificial Sequence
  Synthetic
aagcaaaugucgaggcaaa

SEQ ID NO: 5113 - RNA, 19 nt, Artificial Sequence
  Synthetic
gaacaauaggagauggaaa

SEQ ID NO: 5114 - RNA, 19 nt, Artificial Sequence
  Synthetic
gcacagaacaccagaaaga

SEQ ID NO: 5115 - RNA, 19 nt, Artificial Sequence
  Synthetic
ggaauaagauccugugauu

SEQ ID NO: 5116 - RNA, 19 nt, Artificial Sequence
  Synthetic
ccaggaauguauuggauaa

SEQ ID NO: 5117 - RNA, 19 nt, Artificial Sequence
  Synthetic
gcacaucacuguagaauuu

SEQ ID NO: 5118 - RNA, 19 nt, Artificial Sequence
  Synthetic
acaaauacaccgagagaga

SEQ ID NO: 5119 - RNA, 19 nt, Artificial Sequence
  Synthetic
acacugaacuaguuggaaa

SEQ ID NO: 5120 - RNA, 19 nt, Artificial Sequence
  Synthetic
guagaaagaucgacugcua

SEQ ID NO: 5121 - RNA, 19 nt, Artificial Sequence
  Synthetic
gucaguagcuggaaagaua

SEQ ID NO: 5122 - RNA, 19 nt, Artificial Sequence
  Synthetic
cggaagaacaauaggagau

SEQ ID NO: 5123 - RNA, 19 nt, Artificial Sequence
  Synthetic
gcaccaagauggcagcaaa

SEQ ID NO: 5124 - RNA, 19 nt, Artificial Sequence
  Synthetic
cuacaauaacagaacgaua

SEQ ID NO: 5125 - RNA, 19 nt, Artificial Sequence
  Synthetic
ucacaauccuauucagaaa

SEQ ID NO: 5126 - RNA, 19 nt, Artificial Sequence
  Synthetic
caaggaauguguagaaaga

SEQ ID NO: 5127 - RNA, 19 nt, Artificial Sequence
  Synthetic
agggauaucucaugaaauu

SEQ ID NO: 5128 - RNA, 19 nt, Artificial Sequence
  Synthetic
ggaaagauaaagaagcauu

SEQ ID NO: 5129 - RNA, 19 nt, Artificial Sequence
  Synthetic
ccauagagcccuucaagaa

SEQ ID NO: 5130 - RNA, 19 nt, Artificial Sequence
  Synthetic
cagaggugcgagagaauaa

SEQ ID NO: 5131 - RNA, 19 nt, Artificial Sequence
  Synthetic
gagaagaagugucggagga

SEQ ID NO: 5132 - RNA, 19 nt, Artificial Sequence
  Synthetic
ugguggaaggagagaguua

SEQ ID NO: 5133 - RNA, 19 nt, Artificial Sequence
  Synthetic
caagauggcugaggagaaa

SEQ ID NO: 5134 - RNA, 19 nt, Artificial Sequence
  Synthetic
gaucagggucuuuggacua

SEQ ID NO: 5135 - RNA, 19 nt, Artificial Sequence
  Synthetic
gugaaugucgagugguaaa

SEQ ID NO: 5136 - RNA, 19 nt, Artificial Sequence
  Synthetic
cagagaaccugcuggugua

SEQ ID NO: 5137 - RNA, 19 nt, Artificial Sequence
  Synthetic
auauaaagucggaagaaca

SEQ ID NO: 5138 - RNA, 19 nt, Artificial Sequence
  Synthetic
cuucaaagggauuguguau

SEQ ID NO: 5139 - RNA, 19 nt, Artificial Sequence
  Synthetic
agaagaaggccaagaaagu

SEQ ID NO: 5140 - RNA, 19 nt, Artificial Sequence
  Synthetic
gcacaaggcaugcugacua

SEQ ID NO: 5141 - RNA, 19 nt, Artificial Sequence
  Synthetic
gcucaaagaugcagagaaa

SEQ ID NO: 5142 - RNA, 19 nt, Artificial Sequence
  Synthetic
gggaagaaaugaagagcaa

SEQ ID NO: 5143 - RNA, 19 nt, Artificial Sequence
  Synthetic
cauuuuaaguggagacaua

SEQ ID NO: 5144 - RNA, 19 nt, Artificial Sequence
  Synthetic
uggcaugacuggaugaaua

SEQ ID NO: 5145 - RNA, 19 nt, Artificial Sequence
  Synthetic
caggaaauguagagguaga

SEQ ID NO: 5146 - RNA, 19 nt, Artificial Sequence
  Synthetic
ucaaaguacucaagaugaa

SEQ ID NO: 5147 - RNA, 19 nt, Artificial Sequence
  Synthetic
aaaggaaucccuagaauaa

SEQ ID NO: 5148 - RNA, 19 nt, Artificial Sequence
  Synthetic
gagacagaguggacaauuu

SEQ ID NO: 5149 - RNA, 19 nt, Artificial Sequence
  Synthetic
gguaguguguccuguguaa

SEQ ID NO: 5150 - RNA, 19 nt, Artificial Sequence
  Synthetic
ggauguuaaugaagacuuu

SEQ ID NO: 5151 - RNA, 19 nt, Artificial Sequence
  Synthetic
gagacauauuucagugauu

SEQ ID NO: 5152 - RNA, 19 nt, Artificial Sequence
  Synthetic
ccaaaugguuccagauacu

SEQ ID NO: 5153 - RNA, 19 nt, Artificial Sequence
  Synthetic
guugcaaaguggaauuaaa

SEQ ID NO: 5154 - RNA, 19 nt, Artificial Sequence
  Synthetic
ccagagacaugcuuacaua

SEQ ID NO: 5155 - RNA, 19 nt, Artificial Sequence
  Synthetic
ucagaugauguaugagaaa

SEQ ID NO: 5156 - RNA, 19 nt, Artificial Sequence
  Synthetic
gcuagaaagcauccauuaa

SEQ ID NO: 5157 - RNA, 19 nt, Artificial Sequence
  Synthetic
ucucauagcaggaaaugua

SEQ ID NO: 5158 - RNA, 19 nt, Artificial Sequence
  Synthetic
agacaugcuuacauagaau

SEQ ID NO: 5159 - RNA, 19 nt, Artificial Sequence
  Synthetic
aagaugaauuugaggaacu

SEQ ID NO: 5160 - RNA, 19 nt, Artificial Sequence
  Synthetic
agcaggaaauguagaggua

SEQ ID NO: 5161 - RNA, 19 nt, Artificial Sequence
  Synthetic
guuaaggugugcaguguuu

SEQ ID NO: 5162 - RNA, 19 nt, Artificial Sequence
  Synthetic
gaacaucgcugcagggaag

SEQ ID NO: 5163 - RNA, 19 nt, Artificial Sequence
  Synthetic
gaaaugaagagcaaggcau

SEQ ID NO: 5164 - RNA, 19 nt, Artificial Sequence
  Synthetic
uaaaggaaucccuagaaua

SEQ ID NO: 5165 - RNA, 19 nt, Artificial Sequence
  Synthetic
gaacuacaguggagcuaca

SEQ ID NO: 5166 - RNA, 19 nt, Artificial Sequence
  Synthetic
cagagaaaccuguauuauu

SEQ ID NO: 5167 - RNA, 19 nt, Artificial Sequence
  Synthetic
gccuugaauuggauggaau

SEQ ID NO: 5168 - RNA, 19 nt, Artificial Sequence
  Synthetic
ugaaaaggucaaagaguuu

SEQ ID NO: 5169 - RNA, 19 nt, Artificial Sequence
  Synthetic
caaaguggaauuaaaggaa

SEQ ID NO: 5170 - RNA, 19 nt, Artificial Sequence
  Synthetic
guagaugguuccaguauca

SEQ ID NO: 5171 - RNA, 19 nt, Artificial Sequence
  Synthetic
ggaccuagcuugaggcaau

SEQ ID NO: 5172 - RNA, 19 nt, Artificial Sequence
  Synthetic
ugaaagaggugaagaucau

SEQ ID NO: 5173 - RNA, 19 nt, Artificial Sequence
  Synthetic
uggaguaaauauugggauu

SEQ ID NO: 5174 - RNA, 19 nt, Artificial Sequence
  Synthetic
cuggaugacuuuaggaaga

SEQ ID NO: 5175 - RNA, 19 nt, Artificial Sequence
  Synthetic
ggagauggaguuugaguuu

SEQ ID NO: 5176 - RNA, 19 nt, Artificial Sequence
  Synthetic
gggauggacuccugucuua

SEQ ID NO: 5177 - RNA, 19 nt, Artificial Sequence
  Synthetic
ucucugauguggugaacaa

SEQ ID NO: 5178 - RNA, 19 nt, Artificial Sequence
  Synthetic
ccaaggaggaggaguacuu

SEQ ID NO: 5179 - RNA, 19 nt, Artificial Sequence
  Synthetic
gggacuauauggagccuga

SEQ ID NO: 5180 - RNA, 19 nt, Artificial Sequence
  Synthetic
gcacuaggcagguaauaau

SEQ ID NO: 5181 - RNA, 19 nt, Artificial Sequence
  Synthetic
ggauucuguuuaaggguuu

SEQ ID NO: 5182 - RNA, 19 nt, Artificial Sequence
  Synthetic
ggacaagaaggagaggaaa

SEQ ID NO: 5183 - RNA, 19 nt, Artificial Sequence
  Synthetic
aaauauagcugaugcuguu

SEQ ID NO: 5184 - RNA, 19 nt, Artificial Sequence
  Synthetic
agauggaguuugaguuuga

SEQ ID NO: 5185 - RNA, 19 nt, Artificial Sequence
  Synthetic
cccaccagcuggaggacaa

SEQ ID NO: 5186 - RNA, 19 nt, Artificial Sequence
  Synthetic
ggaaggguggggagaaaua

SEQ ID NO: 5187 - RNA, 19 nt, Artificial Sequence
  Synthetic
gaagugacugugaagauaa

SEQ ID NO: 5188 - RNA, 19 nt, Artificial Sequence
  Synthetic
cugaaagaggugaagauca

SEQ ID NO: 5189 - RNA, 19 nt, Artificial Sequence
  Synthetic
ggagcuaccggcugcguua

SEQ ID NO: 5190 - RNA, 19 nt, Artificial Sequence
  Synthetic
caucaaaaucgcagacuuu

SEQ ID NO: 5191 - RNA, 19 nt, Artificial Sequence
  Synthetic
ccaccaagaaugccaggaa

SEQ ID NO: 5192 - RNA, 19 nt, Artificial Sequence
  Synthetic
cccuaguucucauguguua

SEQ ID NO: 5193 - RNA, 19 nt, Artificial Sequence
  Synthetic
gugaggaggacaagaagga

SEQ ID NO: 5194 - RNA, 19 nt, Artificial Sequence
  Synthetic
ggaccaucccagacaguga

SEQ ID NO: 5195 - RNA, 19 nt, Artificial Sequence
  Synthetic
gggcagacaauguauuuau

SEQ ID NO: 5196 - RNA, 19 nt, Artificial Sequence
  Synthetic
augcugacaugaagggaca

SEQ ID NO: 5197 - RNA, 19 nt, Artificial Sequence
  Synthetic
ugguuacucuucagcgaaa

SEQ ID NO: 5198 - RNA, 19 nt, Artificial Sequence
  Synthetic
aagugacugugaagauaaa

SEQ ID NO: 5199 - RNA, 19 nt, Artificial Sequence
  Synthetic
ugaagugacugugaagaua

SEQ ID NO: 5200 - RNA, 19 nt, Artificial Sequence
  Synthetic
cugagggaguggugcugaa

SEQ ID NO: 5201 - RNA, 19 nt, Artificial Sequence
  Synthetic
gguaagaacuacacaauca

SEQ ID NO: 5202 - RNA, 19 nt, Artificial Sequence
  Synthetic
gcggaaccgucaugggaaa

SEQ ID NO: 5203 - RNA, 19 nt, Artificial Sequence
  Synthetic
guaugagaguggagcuuua

SEQ ID NO: 5204 - RNA, 19 nt, Artificial Sequence
  Synthetic
cagcaugacagaagggcua

SEQ ID NO: 5205 - RNA, 19 nt, Artificial Sequence
  Synthetic
cuagaaaguuccaagguuu

SEQ ID NO: 5206 - RNA, 19 nt, Artificial Sequence
  Synthetic
cugcaaaagcucagguuaa

SEQ ID NO: 5207 - RNA, 19 nt, Artificial Sequence
  Synthetic
ugaacagguuauugagaau

SEQ ID NO: 5208 - RNA, 19 nt, Artificial Sequence
  Synthetic
ccaugaagguccacugcaa

SEQ ID NO: 5209 - RNA, 19 nt, Artificial Sequence
  Synthetic
ggagaagagauacgaagaa

SEQ ID NO: 5210 - RNA, 19 nt, Artificial Sequence
  Synthetic
ucugugaaguggagggaau

SEQ ID NO: 5211 - RNA, 19 nt, Artificial Sequence
  Synthetic
ucaaagagaagcugggaga

SEQ ID NO: 5212 - RNA, 19 nt, Artificial Sequence
  Synthetic
caacaagaaugccaggaau

SEQ ID NO: 5213 - RNA, 19 nt, Artificial Sequence
  Synthetic
guucagugcucuagaaagu

SEQ ID NO: 5214 - RNA, 19 nt, Artificial Sequence
  Synthetic
gagcagaugccaacaagaa

SEQ ID NO: 5215 - RNA, 19 nt, Artificial Sequence
  Synthetic
ggaggaugcuggaugauga

SEQ ID NO: 5216 - RNA, 19 nt, Artificial Sequence
  Synthetic
cauccaggcugauacgaaa

SEQ ID NO: 5217 - RNA, 19 nt, Artificial Sequence
  Synthetic
gcagauaccuggaugaugu

SEQ ID NO: 5218 - RNA, 19 nt, Artificial Sequence
  Synthetic
ugagaauacuggagaguuc

SEQ ID NO: 5219 - RNA, 19 nt, Artificial Sequence
  Synthetic
uuaaggagguacagugcua

SEQ ID NO: 5220 - RNA, 19 nt, Artificial Sequence
  Synthetic
aaucugaaguuuauggcua

SEQ ID NO: 5221 - RNA, 19 nt, Artificial Sequence
  Synthetic
guguauaagcugaugcuca

SEQ ID NO: 5222 - RNA, 19 nt, Artificial Sequence
  Synthetic
cuaaaggugugaagaucuu

SEQ ID NO: 5223 - RNA, 19 nt, Artificial Sequence
  Synthetic
gaacaaggguccaacucga

SEQ ID NO: 5224 - RNA, 19 nt, Artificial Sequence
  Synthetic
gacagaagggcuaggccaa

SEQ ID NO: 5225 - RNA, 19 nt, Artificial Sequence
  Synthetic
ccaacaagaaugccaggaa

SEQ ID NO: 5226 - RNA, 19 nt, Artificial Sequence
  Synthetic
ccuaugauccaaugcuuaa

SEQ ID NO: 5227 - RNA, 19 nt, Artificial Sequence
  Synthetic
cugaugaccugaaggaguu

SEQ ID NO: 5228 - RNA, 19 nt, Artificial Sequence
  Synthetic
acaccaaucugaaguuuau

SEQ ID NO: 5229 - RNA, 19 nt, Artificial Sequence
  Synthetic
uggaugauguucagugaga

SEQ ID NO: 5230 - RNA, 19 nt, Artificial Sequence
  Synthetic
acgaaaacucccagaauuu

SEQ ID NO: 5231 - RNA, 19 nt, Artificial Sequence
  Synthetic
aagcauuggucuuggcaaa

SEQ ID NO: 5232 - RNA, 19 nt, Artificial Sequence
  Synthetic
ccacaucaugcgagagaaa

SEQ ID NO: 5233 - RNA, 19 nt, Artificial Sequence
  Synthetic
agaaauauccggagaaguu

SEQ ID NO: 5234 - RNA, 19 nt, Artificial Sequence
  Synthetic
cuaaauauguccaaggaga

SEQ ID NO: 5235 - RNA, 19 nt, Artificial Sequence
  Synthetic
gcucagaaguggacaaaau

SEQ ID NO: 5236 - RNA, 19 nt, Artificial Sequence
  Synthetic
aguugagaucugugggaaa

SEQ ID NO: 5237 - RNA, 19 nt, Artificial Sequence
  Synthetic
ggagaugaugaaagagauu

SEQ ID NO: 5238 - RNA, 19 nt, Artificial Sequence
  Synthetic
ugaaagagauugacuauga

SEQ ID NO: 5239 - RNA, 19 nt, Artificial Sequence
  Synthetic
gggaggagguuaugaagga

SEQ ID NO: 5240 - RNA, 19 nt, Artificial Sequence
  Synthetic
acaucaugcgagagaaaua

SEQ ID NO: 5241 - RNA, 19 nt, Artificial Sequence
  Synthetic
ccucaaggauuuagagaug

SEQ ID NO: 5242 - RNA, 19 nt, Artificial Sequence
  Synthetic
agagaugaguaaaguggua

SEQ ID NO: 5243 - RNA, 19 nt, Artificial Sequence
  Synthetic
aggauuuagagaugaguaa

SEQ ID NO: 5244 - RNA, 19 nt, Artificial Sequence
  Synthetic
ccagaagacaaguuagaau

SEQ ID NO: 5245 - RNA, 19 nt, Artificial Sequence
  Synthetic
gagagaaauauccggagaa

SEQ ID NO: 5246 - RNA, 19 nt, Artificial Sequence
  Synthetic
gaugaaagagauugacuau

SEQ ID NO: 5247 - RNA, 19 nt, Artificial Sequence
  Synthetic
ccauuggguacgagggauu

SEQ ID NO: 5248 - RNA, 19 nt, Artificial Sequence
  Synthetic
cgagagaaauauccggaga

SEQ ID NO: 5249 - RNA, 19 nt, Artificial Sequence
  Synthetic
cagaagacaaguuagaauu

SEQ ID NO: 5250 - RNA, 19 nt, Artificial Sequence
  Synthetic
acagcagaaugaagaacaa

SEQ ID NO: 5251 - RNA, 19 nt, Artificial Sequence
  Synthetic
ucuagagaccauugacaaa

SEQ ID NO: 5252 - RNA, 19 nt, Artificial Sequence
  Synthetic
ugaguaaagugguacauau

SEQ ID NO: 5253 - RNA, 19 nt, Artificial Sequence
  Synthetic
caggagaugaugaaagaga

SEQ ID NO: 5254 - RNA, 19 nt, Artificial Sequence
  Synthetic
ggugauaccucaacaaacu

SEQ ID NO: 5255 - RNA, 19 nt, Artificial Sequence
  Synthetic
gaggauggcgagauggcua

SEQ ID NO: 5256 - RNA, 19 nt, Artificial Sequence
  Synthetic
uguacgacacggacagaaa

SEQ ID NO: 5257 - RNA, 19 nt, Artificial Sequence
  Synthetic
gagaaguucaacagcagaa

SEQ ID NO: 5258 - RNA, 19 nt, Artificial Sequence
  Synthetic
ccaugcaaauugacggaga

SEQ ID NO: 5259 - RNA, 19 nt, Artificial Sequence
  Synthetic
ggauugacccuguuccuaa

SEQ ID NO: 5260 - RNA, 19 nt, Artificial Sequence
  Synthetic
ggcaaagggugcucuggaa

SEQ ID NO: 5261 - RNA, 19 nt, Artificial Sequence
  Synthetic
aaacaaugcuugagagaaa

SEQ ID NO: 5262 - RNA, 19 nt, Artificial Sequence
  Synthetic
guauaauccugaagggaaa

SEQ ID NO: 5263 - RNA, 19 nt, Artificial Sequence
  Synthetic
gaggaagaccugaggauaa

SEQ ID NO: 5264 - RNA, 19 nt, Artificial Sequence
  Synthetic
gauuagguguggagaauaa

SEQ ID NO: 5265 - RNA, 19 nt, Artificial Sequence
  Synthetic
ccaucgacgaauagagaaa

SEQ ID NO: 5266 - RNA, 19 nt, Artificial Sequence
  Synthetic
agaaauggguuaaugcaua

SEQ ID NO: 5267 - RNA, 19 nt, Artificial Sequence
  Synthetic
gagaacgaauuuacagaaa

SEQ ID NO: 5268 - RNA, 19 nt, Artificial Sequence
  Synthetic
ugaagaaagcagaaguuua

SEQ ID NO: 5269 - RNA, 19 nt, Artificial Sequence
  Synthetic
caaacaaagugauugacaa

SEQ ID NO: 5270 - RNA, 19 nt, Artificial Sequence
  Synthetic
gaaauggguuaaugcauaa

SEQ ID NO: 5271 - RNA, 19 nt, Artificial Sequence
  Synthetic
uugaagaauuccaugguaa

SEQ ID NO: 5272 - RNA, 19 nt, Artificial Sequence
  Synthetic
cagaauaccuugaguggga

SEQ ID NO: 5273 - RNA, 19 nt, Artificial Sequence
  Synthetic
acaaagugauugacaagaa

SEQ ID NO: 5274 - RNA, 19 nt, Artificial Sequence
  Synthetic
uggcaaugaucuagcaaga

SEQ ID NO: 5275 - RNA, 19 nt, Artificial Sequence
  Synthetic
aaguuuaccugaagugaua

SEQ ID NO: 5276 - RNA, 19 nt, Artificial Sequence
  Synthetic
gaacacauaugcuggaaau

SEQ ID NO: 5277 - RNA, 19 nt, Artificial Sequence
  Synthetic
ggugaaaugaugauaagaa

SEQ ID NO: 5278 - RNA, 19 nt, Artificial Sequence
  Synthetic
ggacauagccaaaagcuua

SEQ ID NO: 5279 - RNA, 19 nt, Artificial Sequence
  Synthetic
caaaagugguggaaaacaa

SEQ ID NO: 5280 - RNA, 19 nt, Artificial Sequence
  Synthetic
ggacaaggccugcagguca

SEQ ID NO: 5281 - RNA, 19 nt, Artificial Sequence
  Synthetic
ggaagugguuuaacaguuu

SEQ ID NO: 5282 - RNA, 19 nt, Artificial Sequence
  Synthetic
cauuuaggcuguagacauu

SEQ ID NO: 5283 - RNA, 19 nt, Artificial Sequence
  Synthetic
ggaguagacacaugaacaa

SEQ ID NO: 5284 - RNA, 19 nt, Artificial Sequence
  Synthetic
agaaauagaaugugaugga

SEQ ID NO: 5285 - RNA, 19 nt, Artificial Sequence
  Synthetic
ccagagaaauucaacagua

SEQ ID NO: 5286 - RNA, 19 nt, Artificial Sequence
  Synthetic
uggaagaaauugacuauga

SEQ ID NO: 5287 - RNA, 19 nt, Artificial Sequence
  Synthetic
ccccaaaagugguggaaaa

SEQ ID NO: 5288 - RNA, 19 nt, Artificial Sequence
  Synthetic
cuguagaaauagaauguga

SEQ ID NO: 5289 - RNA, 19 nt, Artificial Sequence
  Synthetic
aauagaaugugauggagua

SEQ ID NO: 5290 - RNA, 19 nt, Artificial Sequence
  Synthetic
acaguagaaugaagaacaa

SEQ ID NO: 5291 - RNA, 19 nt, Artificial Sequence
  Synthetic
ucacaguauccgagaaaua

SEQ ID NO: 5292 - RNA, 19 nt, Artificial Sequence
  Synthetic
gcucagaggugcuuguaaa

SEQ ID NO: 5293 - RNA, 19 nt, Artificial Sequence
  Synthetic
gaacauaacaacacagcua

SEQ ID NO: 5294 - RNA, 19 nt, Artificial Sequence
  Synthetic
cauuaaagacugugcagaa

SEQ ID NO: 5295 - RNA, 19 nt, Artificial Sequence
  Synthetic
cagaaacccuagaguauua

SEQ ID NO: 5296 - RNA, 19 nt, Artificial Sequence
  Synthetic
agaaaugugucaugaacaa

SEQ ID NO: 5297 - RNA, 19 nt, Artificial Sequence
  Synthetic
agucagaggucauggccaa

SEQ ID NO: 5298 - RNA, 19 nt, Artificial Sequence
  Synthetic
aauuugacgugaagagaaa

SEQ ID NO: 5299 - RNA, 19 nt, Artificial Sequence
  Synthetic
gcgcagucgcagugguaaa

SEQ ID NO: 5300 - RNA, 19 nt, Artificial Sequence
  Synthetic
ggaaggugguuguauguua

SEQ ID NO: 5301 - RNA, 19 nt, Artificial Sequence
  Synthetic
acaagaaccuggagcaaaa

SEQ ID NO: 5302 - RNA, 19 nt, Artificial Sequence
  Synthetic
ucgaaaucuccgugugaaa

SEQ ID NO: 5303 - RNA, 19 nt, Artificial Sequence
  Synthetic
caaguuagaaugugaggaa

SEQ ID NO: 5304 - RNA, 19 nt, Artificial Sequence
  Synthetic
gcucugaacuaguagauga

SEQ ID NO: 5305 - RNA, 19 nt, Artificial Sequence
  Synthetic
gcugauaacagaaaagaaa

SEQ ID NO: 5306 - RNA, 19 nt, Artificial Sequence
  Synthetic
cggcaaagucaaucauauu

SEQ ID NO: 5307 - RNA, 19 nt, Artificial Sequence
  Synthetic
cgacaagaccuguggcagu

SEQ ID NO: 5308 - RNA, 19 nt, Artificial Sequence
  Synthetic
gagaagugcaggagccgaa

SEQ ID NO: 5309 - RNA, 19 nt, Artificial Sequence
  Synthetic
gauuguaauuugacgugaa

SEQ ID NO: 5310 - RNA, 19 nt, Artificial Sequence
  Synthetic
gguggagcgucauggcaua

SEQ ID NO: 5311 - RNA, 19 nt, Artificial Sequence
  Synthetic
gaacaacuauuuuggcauu

SEQ ID NO: 5312 - RNA, 19 nt, Artificial Sequence
  Synthetic
agauuggauugcagcauua

SEQ ID NO: 5313 - RNA, 19 nt, Artificial Sequence
  Synthetic
ccaaagagaaggacagugu

SEQ ID NO: 5314 - RNA, 19 nt, Artificial Sequence
  Synthetic
cuuuaagcuucgagggcga

SEQ ID NO: 5315 - RNA, 19 nt, Artificial Sequence
  Synthetic
cggaggagucagaggucau

SEQ ID NO: 5316 - RNA, 19 nt, Artificial Sequence
  Synthetic
cagaagauucaaacagcua

SEQ ID NO: 5317 - RNA, 19 nt, Artificial Sequence
  Synthetic
uccuggaaauggugaauaa

SEQ ID NO: 5318 - RNA, 19 nt, Artificial Sequence
  Synthetic
uggaaauggugaauaacuu

SEQ ID NO: 5319 - RNA, 19 nt, Artificial Sequence
  Synthetic
accagaaacccuagaguau

SEQ ID NO: 5320 - RNA, 19 nt, Artificial Sequence
  Synthetic
ugaagaugcagaugggauu

SEQ ID NO: 5321 - RNA, 19 nt, Artificial Sequence
  Synthetic
ggaaaugauuacugucaaa

SEQ ID NO: 5322 - RNA, 19 nt, Artificial Sequence
  Synthetic
gagaaggacuguugggaga

SEQ ID NO: 5323 - RNA, 19 nt, Artificial Sequence
  Synthetic
uaaacuagaucgauggaaa

SEQ ID NO: 5324 - RNA, 19 nt, Artificial Sequence
  Synthetic
gugcaagaauguaaagauu

SEQ ID NO: 5325 - RNA, 19 nt, Artificial Sequence
  Synthetic
agguuaugcuggagaaauu

SEQ ID NO: 5326 - RNA, 19 nt, Artificial Sequence
  Synthetic
acaugaagauuaagggaca

SEQ ID NO: 5327 - RNA, 19 nt, Artificial Sequence
  Synthetic
ggaagcagauggaauuaaa

SEQ ID NO: 5328 - RNA, 19 nt, Artificial Sequence
  Synthetic
gcaaggagauuaugcucaa

SEQ ID NO: 5329 - RNA, 19 nt, Artificial Sequence
  Synthetic
ggaaaguucaaguaacaaa

SEQ ID NO: 5330 - RNA, 19 nt, Artificial Sequence
  Synthetic
agauuaugcucaagaauga

SEQ ID NO: 5331 - RNA, 19 nt, Artificial Sequence
  Synthetic
ccauuaaucagaugcguaa

SEQ ID NO: 5332 - RNA, 19 nt, Artificial Sequence
  Synthetic
caaagauuguuuagugcaa

SEQ ID NO: 5333 - RNA, 19 nt, Artificial Sequence
  Synthetic
ucagaugcguaaagacaaa

SEQ ID NO: 5334 - RNA, 19 nt, Artificial Sequence
  Synthetic
gcacauacagugaggcuga

SEQ ID NO: 5335 - RNA, 19 nt, Artificial Sequence
  Synthetic
guugaugacaugaagauua

SEQ ID NO: 5336 - RNA, 19 nt, Artificial Sequence
  Synthetic
ggcuaauccuuuucgaaua

SEQ ID NO: 5337 - RNA, 19 nt, Artificial Sequence
  Synthetic
gagaaacagauaagugaau

SEQ ID NO: 5338 - RNA, 19 nt, Artificial Sequence
  Synthetic
auauaaaggcgacugaaua

SEQ ID NO: 5339 - RNA, 19 nt, Artificial Sequence
  Synthetic
gcuggaagucguuggagua

SEQ ID NO: 5340 - RNA, 19 nt, Artificial Sequence
  Synthetic
ggaagucguuggaguauau

SEQ ID NO: 5341 - RNA, 19 nt, Artificial Sequence
  Synthetic
gguggaaagaucaaauuaa

SEQ ID NO: 5342 - RNA, 19 nt, Artificial Sequence
  Synthetic
gauauaaaggcgacugaau

SEQ ID NO: 5343 - RNA, 19 nt, Artificial Sequence
  Synthetic
gggaacaggcaacgaucua

SEQ ID NO: 5344 - RNA, 19 nt, Artificial Sequence
  Synthetic
guuuagugcaagaauguaa

SEQ ID NO: 5345 - RNA, 19 nt, Artificial Sequence
  Synthetic
auggaaaguucaaguaaca

SEQ ID NO: 5346 - RNA, 19 nt, Artificial Sequence
  Synthetic
acagauaagugaauuggua

SEQ ID NO: 5347 - RNA, 19 nt, Artificial Sequence
  Synthetic
uaagaaaacccaaggaauu

SEQ ID NO: 5348 - RNA, 19 nt, Artificial Sequence
  Synthetic
gagaacaaacagaugauga

SEQ ID NO: 5349 - RNA, 19 nt, Artificial Sequence
  Synthetic
cggaucaagaagauauaaa

SEQ ID NO: 5350 - RNA, 19 nt, Artificial Sequence
  Synthetic
gcaaguagauacauguuca

SEQ ID NO: 5351 - RNA, 19 nt, Artificial Sequence
  Synthetic
gggaauaaaccgcgaagaa

SEQ ID NO: 5352 - RNA, 19 nt, Artificial Sequence
  Synthetic
ggauguugccuaaggaaua

SEQ ID NO: 5353 - RNA, 19 nt, Artificial Sequence
  Synthetic
ccacaggccuugagcagaa

SEQ ID NO: 5354 - RNA, 19 nt, Artificial Sequence
  Synthetic
ccagagaggaaguggaaaa

SEQ ID NO: 5355 - RNA, 19 nt, Artificial Sequence
  Synthetic
acgcauggguggaagggaa

SEQ ID NO: 5356 - RNA, 19 nt, Artificial Sequence
  Synthetic
ccaugugaugagagagaaa

SEQ ID NO: 5357 - RNA, 19 nt, Artificial Sequence
  Synthetic
caagagagaaagcaagaaa

SEQ ID NO: 5358 - RNA, 19 nt, Artificial Sequence
  Synthetic
gcagaaaggcuguggaaag

SEQ ID NO: 5359 - RNA, 19 nt, Artificial Sequence
  Synthetic
caaacaagcugcugccaau

SEQ ID NO: 5360 - RNA, 19 nt, Artificial Sequence
  Synthetic
gagacaaggagaaagaauu

SEQ ID NO: 5361 - RNA, 19 nt, Artificial Sequence
  Synthetic
gaauauuccuccaagaaga

SEQ ID NO: 5362 - RNA, 19 nt, Artificial Sequence
  Synthetic
ugaaggauguugugugcua

SEQ ID NO: 5363 - RNA, 19 nt, Artificial Sequence
  Synthetic
gcaagaaacuccacgacca

SEQ ID NO: 5364 - RNA, 19 nt, Artificial Sequence
  Synthetic
ggagacaaggagaaagaau

SEQ ID NO: 5365 - RNA, 19 nt, Artificial Sequence
  Synthetic
aggauaagcuggaguucau

SEQ ID NO: 5366 - RNA, 19 nt, Artificial Sequence
  Synthetic
agagaaagcaagaaacuau

SEQ ID NO: 5367 - RNA, 19 nt, Artificial Sequence
  Synthetic
acauugaguuggaguguga

SEQ ID NO: 5368 - RNA, 19 nt, Artificial Sequence
  Synthetic
uugaccaacuccagaaaua

SEQ ID NO: 5369 - RNA, 19 nt, Artificial Sequence
  Synthetic
cagaagaauuugaccaacu

SEQ ID NO: 5370 - RNA, 19 nt, Artificial Sequence
  Synthetic
cagccauguugcacgauua

SEQ ID NO: 5371 - RNA, 19 nt, Artificial Sequence
  Synthetic
cauacagcaucaugaacaa

SEQ ID NO: 5372 - RNA, 19 nt, Artificial Sequence
  Synthetic
ccgcaaaugugaauuauca

SEQ ID NO: 5373 - RNA, 19 nt, Artificial Sequence
  Synthetic
agggagacaaggagaaaga

SEQ ID NO: 5374 - RNA, 19 nt, Artificial Sequence
  Synthetic
acagcaggaugaagaacaa

SEQ ID NO: 5375 - RNA, 19 nt, Artificial Sequence
  Synthetic
caaauauggcugagaagca

SEQ ID NO: 5376 - RNA, 19 nt, Artificial Sequence
  Synthetic
gcacaaaguucccucugua

SEQ ID NO: 5377 - RNA, 19 nt, Artificial Sequence
  Synthetic
gcggagaaacugggauuua

SEQ ID NO: 5378 - RNA, 19 nt, Artificial Sequence
  Synthetic
aaucaaauauggcugagaa

SEQ ID NO: 5379 - RNA, 19 nt, Artificial Sequence
  Synthetic
caaugcaaguggauggaga

SEQ ID NO: 5380 - RNA, 19 nt, Artificial Sequence
  Synthetic
ccccaagaguggagggaga

SEQ ID NO: 5381 - RNA, 19 nt, Artificial Sequence
  Synthetic
guucagaagcagaagacaa

SEQ ID NO: 5382 - RNA, 19 nt, Artificial Sequence
  Synthetic
ggagauaaucagggaguaa

SEQ ID NO: 5383 - RNA, 19 nt, Artificial Sequence
  Synthetic
gaacaauuacuuugggauu

SEQ ID NO: 5384 - RNA, 19 nt, Artificial Sequence
  Synthetic
ggacauuauagaagaugaa

SEQ ID NO: 5385 - RNA, 19 nt, Artificial Sequence
  Synthetic
guagauggauauucagaaa

SEQ ID NO: 5386 - RNA, 19 nt, Artificial Sequence
  Synthetic
ggguggaacuaaagaggau

SEQ ID NO: 5387 - RNA, 19 nt, Artificial Sequence
  Synthetic
caguaaauguucaguccua

SEQ ID NO: 5388 - RNA, 19 nt, Artificial Sequence
  Synthetic
ggaggaagcuaaagaugau

SEQ ID NO: 5389 - RNA, 19 nt, Artificial Sequence
  Synthetic
gugaagagucccuggguga

SEQ ID NO: 5390 - RNA, 19 nt, Artificial Sequence
  Synthetic
ggaaaugccuuugguguaa

SEQ ID NO: 5391 - RNA, 19 nt, Artificial Sequence
  Synthetic
ggacagcuauugaagcaaa

SEQ ID NO: 5392 - RNA, 19 nt, Artificial Sequence
  Synthetic
gggcaaauaguuuaaagaa

SEQ ID NO: 5393 - RNA, 19 nt, Artificial Sequence
  Synthetic
ggauuggauuagaugcaaa

SEQ ID NO: 5394 - RNA, 19 nt, Artificial Sequence
  Synthetic
acucaaagucucugauauu

SEQ ID NO: 5395 - RNA, 19 nt, Artificial Sequence
  Synthetic
cgaaggagucccagugcaa

SEQ ID NO: 5396 - RNA, 19 nt, Artificial Sequence
  Synthetic
acaaaauguuacuggcaaa

SEQ ID NO: 5397 - RNA, 19 nt, Artificial Sequence
  Synthetic
agacacugccacugaaaua

SEQ ID NO: 5398 - RNA, 19 nt, Artificial Sequence
  Synthetic
gaaaggagauggaggauug

SEQ ID NO: 5399 - RNA, 19 nt, Artificial Sequence
  Synthetic
gguucagccuccagggauu

SEQ ID NO: 5400 - RNA, 19 nt, Artificial Sequence
  Synthetic
cagaagaggugucgcagau

SEQ ID NO: 5401 - RNA, 19 nt, Artificial Sequence
  Synthetic
ccucaauucugaugaacau

SEQ ID NO: 5402 - RNA, 19 nt, Artificial Sequence
  Synthetic
ccggaaaaguuauggauga

SEQ ID NO: 5403 - RNA, 19 nt, Artificial Sequence
  Synthetic
cggaagaagaagagaacaa

SEQ ID NO: 5404 - RNA, 19 nt, Artificial Sequence
  Synthetic
ggaagaagcugauggaauu

SEQ ID NO: 5405 - RNA, 19 nt, Artificial Sequence
  Synthetic
gcaaagaggacaugagcaa

SEQ ID NO: 5406 - RNA, 19 nt, Artificial Sequence
  Synthetic
cagaagagcaagaggagaa

SEQ ID NO: 5407 - RNA, 19 nt, Artificial Sequence
  Synthetic
guaaagagauuguggcuau

SEQ ID NO: 5408 - RNA, 19 nt, Artificial Sequence
  Synthetic
gaagaugagcaaaggauua

SEQ ID NO: 5409 - RNA, 19 nt, Artificial Sequence
  Synthetic
aagcaaauccagagaaauu

SEQ ID NO: 5410 - RNA, 19 nt, Artificial Sequence
  Synthetic
agaagcaaauccagagaaa

SEQ ID NO: 5411 - RNA, 19 nt, Artificial Sequence
  Synthetic
cgucagaacuauaagguca

SEQ ID NO: 5412 - RNA, 19 nt, Artificial Sequence
  Synthetic
aguaauagcuggugaucuu

SEQ ID NO: 5413 - RNA, 19 nt, Artificial Sequence
  Synthetic
gggaagugccacauggaua

SEQ ID NO: 5414 - RNA, 19 nt, Artificial Sequence
  Synthetic
gguaagacaccucaagaaa

SEQ ID NO: 5415 - RNA, 19 nt, Artificial Sequence
  Synthetic
gagcaaaggauuaaacaga

SEQ ID NO: 5416 - RNA, 19 nt, Artificial Sequence
  Synthetic
cgacuugccuccagaagaa

SEQ ID NO: 5417 - RNA, 19 nt, Artificial Sequence
  Synthetic
acgaagcgcuggaggagaa

SEQ ID NO: 5418 - RNA, 19 nt, Artificial Sequence
  Synthetic
ggaagugccacauggauaa

SEQ ID NO: 5419 - RNA, 19 nt, Artificial Sequence
  Synthetic
ugaauguccugcagaaaua

SEQ ID NO: 5420 - RNA, 19 nt, Artificial Sequence
  Synthetic
aagaagagaacaagcuuua

SEQ ID NO: 5421 - RNA, 19 nt, Artificial Sequence
  Synthetic
gguaagggcuuccagcaaa

SEQ ID NO: 5422 - RNA, 19 nt, Artificial Sequence
  Synthetic
gaggagaagcugaggaacu

SEQ ID NO: 5423 - RNA, 19 nt, Artificial Sequence
  Synthetic
agacggacuccaaggguaa

SEQ ID NO: 5424 - RNA, 19 nt, Artificial Sequence
  Synthetic
aaacagaggcccacagcua

SEQ ID NO: 5425 - RNA, 19 nt, Artificial Sequence
  Synthetic
gaaccaaaguccugcagau

SEQ ID NO: 5426 - RNA, 19 nt, Artificial Sequence
  Synthetic
gcagucauuuggagcgaua

SEQ ID NO: 5427 - RNA, 19 nt, Artificial Sequence
  Synthetic
caacauaugucacugaaau

SEQ ID NO: 5428 - RNA, 19 nt, Artificial Sequence
  Synthetic
ggacaguuguacagcuaga

SEQ ID NO: 5429 - RNA, 19 nt, Artificial Sequence
  Synthetic
caacagucguuuucgaaau

SEQ ID NO: 5430 - RNA, 19 nt, Artificial Sequence
  Synthetic
ccaaauaucuacuugacuu

SEQ ID NO: 5431 - RNA, 19 nt, Artificial Sequence
  Synthetic
cuuccgaguuauuggauau

SEQ ID NO: 5432 - RNA, 19 nt, Artificial Sequence
  Synthetic
gcacaaugcccuggggaaa

SEQ ID NO: 5433 - RNA, 19 nt, Artificial Sequence
  Synthetic
ggacgaugcugauggacga

SEQ ID NO: 5434 - RNA, 19 nt, Artificial Sequence
  Synthetic
gggaagaggagccuggcaa

SEQ ID NO: 5435 - RNA, 19 nt, Artificial Sequence
  Synthetic
ggguccaggcagagagaca

SEQ ID NO: 5436 - RNA, 19 nt, Artificial Sequence
  Synthetic
ugaggaaggccaagcagaa

SEQ ID NO: 5437 - RNA, 19 nt, Artificial Sequence
  Synthetic
agaucgugcagaugaguaa

SEQ ID NO: 5438 - RNA, 19 nt, Artificial Sequence
  Synthetic
ccgagagucccgagagcuu

SEQ ID NO: 5439 - RNA, 19 nt, Artificial Sequence
  Synthetic
aagcaaacgcugaagaucu

SEQ ID NO: 5440 - RNA, 19 nt, Artificial Sequence
  Synthetic
gccugaagcacgugaggau

SEQ ID NO: 5441 - RNA, 19 nt, Artificial Sequence
  Synthetic
ggaagcaaacgcugaagau

SEQ ID NO: 5442 - RNA, 19 nt, Artificial Sequence
  Synthetic
gcagagagacacaggcaac

SEQ ID NO: 5443 - RNA, 19 nt, Artificial Sequence
  Synthetic
ccgugguguccgugaguca

SEQ ID NO: 5444 - RNA, 19 nt, Artificial Sequence
  Synthetic
gggcacagggaaugaccuu

SEQ ID NO: 5445 - RNA, 19 nt, Artificial Sequence
  Synthetic
ucagcaagacgcagagcuu

SEQ ID NO: 5446 - RNA, 19 nt, Artificial Sequence
  Synthetic
aggaugggcaccaggauca

SEQ ID NO: 5447 - RNA, 19 nt, Artificial Sequence
  Synthetic
agguggagcugcccaguau

SEQ ID NO: 5448 - RNA, 19 nt, Artificial Sequence
  Synthetic
uguacaugcugcugaagga

SEQ ID NO: 5449 - RNA, 19 nt, Artificial Sequence
  Synthetic
cagagaacgacacggcaga

SEQ ID NO: 5450 - RNA, 19 nt, Artificial Sequence
  Synthetic
aggugcacaugcugaggaa

SEQ ID NO: 5451 - RNA, 19 nt, Artificial Sequence
  Synthetic
agcaaacgcugaagaucuu

SEQ ID NO: 5452 - RNA, 19 nt, Artificial Sequence
  Synthetic
gagccuggcaaguucacaa

SEQ ID NO: 5453 - RNA, 19 nt, Artificial Sequence
  Synthetic
gggaagcaaacgcugaaga

SEQ ID NO: 5454 - RNA, 19 nt, Artificial Sequence
  Synthetic
cgacagcgacaccagguuu

SEQ ID NO: 5455 - RNA, 19 nt, Artificial Sequence
  Synthetic
ggcuguacaugcugcugaa

SEQ ID NO: 5456 - RNA, 19 nt, Artificial Sequence
  Synthetic
gcagaagaucagucacucu

SEQ ID NO: 5457 - RNA, 19 nt, Artificial Sequence
  Synthetic
ugcgaggucugcaggaaga

SEQ ID NO: 5458 - RNA, 19 nt, Artificial Sequence
  Synthetic
gcugucauauauugaaguu

SEQ ID NO: 5459 - RNA, 19 nt, Artificial Sequence
  Synthetic
ggugagaagaagccaguuc

SEQ ID NO: 5460 - RNA, 19 nt, Artificial Sequence
  Synthetic
cccaagaucgugcagauga

SEQ ID NO: 5461 - RNA, 19 nt, Artificial Sequence
  Synthetic
ccaagaucgugcagaugag

SEQ ID NO: 5462 - RNA, 19 nt, Artificial Sequence
  Synthetic
ggagcugcccaguauugaa

SEQ ID NO: 5463 - RNA, 19 nt, Artificial Sequence
  Synthetic
aagaagaagaagagggcau

SEQ ID NO: 5464 - RNA, 19 nt, Artificial Sequence
  Synthetic
gcaaggagauuguggccau

SEQ ID NO: 5465 - RNA, 19 nt, Artificial Sequence
  Synthetic
ucgcacaggaugagauuua

SEQ ID NO: 5466 - RNA, 19 nt, Artificial Sequence
  Synthetic
aggccaacccagagaaauu

SEQ ID NO: 5467 - RNA, 19 nt, Artificial Sequence
  Synthetic
gcaucgagcagcuggagaa

SEQ ID NO: 5468 - RNA, 19 nt, Artificial Sequence
  Synthetic
gcaaggaugugguccgcua

SEQ ID NO: 5469 - RNA, 19 nt, Artificial Sequence
  Synthetic
gaggaaguccagcaagaaa

SEQ ID NO: 5470 - RNA, 19 nt, Artificial Sequence
  Synthetic
ggagcgagucagcgacaua

SEQ ID NO: 5471 - RNA, 19 nt, Artificial Sequence
  Synthetic
aagaggaaguccagcaaga

SEQ ID NO: 5472 - RNA, 19 nt, Artificial Sequence
  Synthetic
gcuccaaggaccuggccaa

SEQ ID NO: 5473 - RNA, 19 nt, Artificial Sequence
  Synthetic
aagcaagcaagaagaagaa

SEQ ID NO: 5474 - RNA, 19 nt, Artificial Sequence
  Synthetic
gcaagcaagaagaagaaga

SEQ ID NO: 5475 - RNA, 19 nt, Artificial Sequence
  Synthetic
cagaugagccuguguccaa

SEQ ID NO: 5476 - RNA, 19 nt, Artificial Sequence
  Synthetic
ccaaggaggcgcuggagau

SEQ ID NO: 5477 - RNA, 19 nt, Artificial Sequence
  Synthetic
gcacaggaugagauuuaua

SEQ ID NO: 5478 - RNA, 19 nt, Artificial Sequence
  Synthetic
agacagaccagcagggcga

SEQ ID NO: 5479 - RNA, 19 nt, Artificial Sequence
  Synthetic
gagcagcuggagaagauaa

SEQ ID NO: 5480 - RNA, 19 nt, Artificial Sequence
  Synthetic
ucgagcagcuggagaagau

SEQ ID NO: 5481 - RNA, 19 nt, Artificial Sequence
  Synthetic
acuaugaggcccugcacua

SEQ ID NO: 5482 - RNA, 19 nt, Artificial Sequence
  Synthetic
aggaggcgcuggagaugua

SEQ ID NO: 5483 - RNA, 19 nt, Artificial Sequence
  Synthetic
ugaaagcaagcaagaagaa

SEQ ID NO: 5484 - RNA, 19 nt, Artificial Sequence
  Synthetic
aaagcaagcaagaagaaga

SEQ ID NO: 5485 - RNA, 19 nt, Artificial Sequence
  Synthetic
gaaucaggcuccaggaaug

SEQ ID NO: 5486 - RNA, 19 nt, Artificial Sequence
  Synthetic
gagcacaucugguucgaga

SEQ ID NO: 5487 - RNA, 19 nt, Artificial Sequence
  Synthetic
cagcuggagaagauaaauu

SEQ ID NO: 5488 - RNA, 19 nt, Artificial Sequence
  Synthetic
cgacauauggggagcacau

SEQ ID NO: 5489 - RNA, 19 nt, Artificial Sequence
  Synthetic
ccauggugcagaaggccaa

SEQ ID NO: 5490 - RNA, 19 nt, Artificial Sequence
  Synthetic
aagauaaauuuccgcugua

SEQ ID NO: 5491 - RNA, 19 nt, Artificial Sequence
  Synthetic
agauaaauuuccgcuguaa

SEQ ID NO: 5492 - RNA, 19 nt, Artificial Sequence
  Synthetic
uggagaaccggcagcacua

SEQ ID NO: 5493 - RNA, 19 nt, Artificial Sequence
  Synthetic
aagaagaccucaugagaga

SEQ ID NO: 5494 - RNA, 19 nt, Artificial Sequence
  Synthetic
ggaaguaaccaaacaagaa

SEQ ID NO: 5495 - RNA, 19 nt, Artificial Sequence
  Synthetic
guaaagaaucuguaaccaa

SEQ ID NO: 5496 - RNA, 19 nt, Artificial Sequence
  Synthetic
gggaggaggagaaaggaau

SEQ ID NO: 5497 - RNA, 19 nt, Artificial Sequence
  Synthetic
cuuggaaacuugcuggaua

SEQ ID NO: 5498 - RNA, 19 nt, Artificial Sequence
  Synthetic
cucaagagcugguuuguua

SEQ ID NO: 5499 - RNA, 19 nt, Artificial Sequence
  Synthetic
gguaacauccucaagcaaa

SEQ ID NO: 5500 - RNA, 19 nt, Artificial Sequence
  Synthetic
guaacauccucaagcaaau

SEQ ID NO: 5501 - RNA, 19 nt, Artificial Sequence
  Synthetic
guagcaacauggcagaaua

SEQ ID NO: 5502 - RNA, 19 nt, Artificial Sequence
  Synthetic
gcacguagcuacagaaccu

SEQ ID NO: 5503 - RNA, 19 nt, Artificial Sequence
  Synthetic
gagcgagugagcagcgaua

SEQ ID NO: 5504 - RNA, 19 nt, Artificial Sequence
  Synthetic
uuggaaacuugcuggauau

SEQ ID NO: 5505 - RNA, 19 nt, Artificial Sequence
  Synthetic
ggaggaggagaaaggaauu

SEQ ID NO: 5506 - RNA, 19 nt, Artificial Sequence
  Synthetic
agagcugguuuguuaauua

SEQ ID NO: 5507 - RNA, 19 nt, Artificial Sequence
  Synthetic
ggaugucaaugaugauuuu

SEQ ID NO: 5508 - RNA, 19 nt, Artificial Sequence
  Synthetic
gaaacuugcuggauaugau

SEQ ID NO: 5509 - RNA, 19 nt, Artificial Sequence
  Synthetic
caacgaagcuccacuuuga

SEQ ID NO: 5510 - RNA, 19 nt, Artificial Sequence
  Synthetic
gcacgaugguccuacacau

SEQ ID NO: 5511 - RNA, 19 nt, Artificial Sequence
  Synthetic
caagcaaaucagaaugaga

SEQ ID NO: 5512 - RNA, 19 nt, Artificial Sequence
  Synthetic
ggaagugaucgcuguguga

SEQ ID NO: 5513 - RNA, 19 nt, Artificial Sequence
  Synthetic
ggaaaguccacguuuguga

SEQ ID NO: 5514 - RNA, 19 nt, Artificial Sequence
  Synthetic
aaguacagcuggagcccuu

SEQ ID NO: 5515 - RNA, 19 nt, Artificial Sequence
  Synthetic
ccuacacauuccagacauu

SEQ ID NO: 5516 - RNA, 19 nt, Artificial Sequence
  Synthetic
acagguauaucuuugcaaa

SEQ ID NO: 5517 - RNA, 19 nt, Artificial Sequence
  Synthetic
acuuugaggcucugaugaa

SEQ ID NO: 5518 - RNA, 19 nt, Artificial Sequence
  Synthetic
ucgaaggcaacauugguaa

SEQ ID NO: 5519 - RNA, 19 nt, Artificial Sequence
  Synthetic
aggaaguaaccaaacaaga

SEQ ID NO: 5520 - RNA, 19 nt, Artificial Sequence
  Synthetic
ccaggaagccaguacagau

SEQ ID NO: 5521 - RNA, 19 nt, Artificial Sequence
  Synthetic
ccaaacaagaagaccucau

SEQ ID NO: 5522 - RNA, 19 nt, Artificial Sequence
  Synthetic
caacauugcugugggaaag

SEQ ID NO: 5523 - RNA, 19 nt, Artificial Sequence
  Synthetic
gcaaggagcuccagaggaa

SEQ ID NO: 5524 - RNA, 19 nt, Artificial Sequence
  Synthetic
gaagacagccaaagaaaua

SEQ ID NO: 5525 - RNA, 19 nt, Artificial Sequence
  Synthetic
ccucagagcuccaggauca

SEQ ID NO: 5526 - RNA, 19 nt, Artificial Sequence
  Synthetic
ggaagaaagugguuuggaa

SEQ ID NO: 5527 - RNA, 19 nt, Artificial Sequence
  Synthetic
cuuaagaauuacaggaaga

SEQ ID NO: 5528 - RNA, 19 nt, Artificial Sequence
  Synthetic
gaacaugggaggaguaaaa

SEQ ID NO: 5529 - RNA, 19 nt, Artificial Sequence
  Synthetic
gcacuauguaggaggaaau

SEQ ID NO: 5530 - RNA, 19 nt, Artificial Sequence
  Synthetic
gaauuuagcuaaugagacu

SEQ ID NO: 5531 - RNA, 19 nt, Artificial Sequence
  Synthetic
aggaggaaaugcagcuuua

SEQ ID NO: 5532 - RNA, 19 nt, Artificial Sequence
  Synthetic
gcuccaggaucaucaguaa

SEQ ID NO: 5533 - RNA, 19 nt, Artificial Sequence
  Synthetic
cuagccaacuuaagaauua

SEQ ID NO: 5534 - RNA, 19 nt, Artificial Sequence
  Synthetic
uggaagacagccaaagaaa

SEQ ID NO: 5535 - RNA, 19 nt, Artificial Sequence
  Synthetic
caaacaagccaguaguaga

SEQ ID NO: 5536 - RNA, 19 nt, Artificial Sequence
  Synthetic
aaacaagccaguaguagaa

SEQ ID NO: 5537 - RNA, 19 nt, Artificial Sequence
  Synthetic
gcuccaggauuguauuaaa

SEQ ID NO: 5538 - RNA, 19 nt, Artificial Sequence
  Synthetic
ugaauaugcuggagguguu

SEQ ID NO: 5539 - RNA, 19 nt, Artificial Sequence
  Synthetic
gagcaugucagcuggagaa

SEQ ID NO: 5540 - RNA, 19 nt, Artificial Sequence
  Synthetic
ggaagacagccaaagaaau

SEQ ID NO: 5541 - RNA, 19 nt, Artificial Sequence
  Synthetic
caucagguauuuuaagcua

SEQ ID NO: 5542 - RNA, 19 nt, Artificial Sequence
  Synthetic
ggaauaugcuccugugugu

SEQ ID NO: 5543 - RNA, 19 nt, Artificial Sequence
  Synthetic
gggcaaggaucaugauuuc

SEQ ID NO: 5544 - RNA, 19 nt, Artificial Sequence
  Synthetic
ggauuguauuaaacccaaa

SEQ ID NO: 5545 - RNA, 19 nt, Artificial Sequence
  Synthetic
gucaugagcugaaggauca

SEQ ID NO: 5546 - RNA, 19 nt, Artificial Sequence
  Synthetic
ggaugugcuuucugccaua

SEQ ID NO: 5547 - RNA, 19 nt, Artificial Sequence
  Synthetic
guuaacagaucauggaugu

SEQ ID NO: 5548 - RNA, 19 nt, Artificial Sequence
  Synthetic
gauuaaacuguaucaggua

SEQ ID NO: 5549 - RNA, 19 nt, Artificial Sequence
  Synthetic
ccauaaaguguguagccaa

SEQ ID NO: 5550 - RNA, 19 nt, Artificial Sequence
  Synthetic
ccaagaaaagucugaacaa

SEQ ID NO: 5551 - RNA, 19 nt, Artificial Sequence
  Synthetic
ccucaagggcauucgacau

SEQ ID NO: 5552 - RNA, 19 nt, Artificial Sequence
  Synthetic
gggucauccuguaugguga

SEQ ID NO: 5553 - RNA, 19 nt, Artificial Sequence
  Synthetic
ucgugaagugguagccaua

SEQ ID NO: 5554 - RNA, 19 nt, Artificial Sequence
  Synthetic
cugagaagguggcgcgugu

SEQ ID NO: 5555 - RNA, 19 nt, Artificial Sequence
  Synthetic
uguacaaggccuacgccaa

SEQ ID NO: 5556 - RNA, 19 nt, Artificial Sequence
  Synthetic
ccacgguguacaaggccua

SEQ ID NO: 5557 - RNA, 19 nt, Artificial Sequence
  Synthetic
aggcaucgguggagaaccu

SEQ ID NO: 5558 - RNA, 19 nt, Artificial Sequence
  Synthetic
acaaggcaucgguggagaa

SEQ ID NO: 5559 - RNA, 19 nt, Artificial Sequence
  Synthetic
acauugugcagcugaaaga

SEQ ID NO: 5560 - RNA, 19 nt, Artificial Sequence
  Synthetic
cauaaaguguguagccaag

SEQ ID NO: 5561 - RNA, 19 nt, Artificial Sequence
  Synthetic
ccuaaaacuggcagacuuu

SEQ ID NO: 5562 - RNA, 19 nt, Artificial Sequence
  Synthetic
uaaugauugugguggaaua

SEQ ID NO: 5563 - RNA, 19 nt, Artificial Sequence
  Synthetic
ugacauggcagcagaacaa

SEQ ID NO: 5564 - RNA, 19 nt, Artificial Sequence
  Synthetic
ucagaagagaagagaagaa

SEQ ID NO: 5565 - RNA, 19 nt, Artificial Sequence
  Synthetic
aagaauucguauugagaga

SEQ ID NO: 5566 - RNA, 19 nt, Artificial Sequence
  Synthetic
agaugaagucagaagagaa

SEQ ID NO: 5567 - RNA, 19 nt, Artificial Sequence
  Synthetic
uuugaagacaccagggaaa

SEQ ID NO: 5568 - RNA, 19 nt, Artificial Sequence
  Synthetic
gaagagauuuucuaagaga

SEQ ID NO: 5569 - RNA, 19 nt, Artificial Sequence
  Synthetic
acauaaaagccaagaugaa

SEQ ID NO: 5570 - RNA, 19 nt, Artificial Sequence
  Synthetic
ugaaacaggagaugaaaga

SEQ ID NO: 5571 - RNA, 19 nt, Artificial Sequence
  Synthetic
gaagaaaccacuuacagaa

SEQ ID NO: 5572 - RNA, 19 nt, Artificial Sequence
  Synthetic
cagaagagaagagaagaaa

SEQ ID NO: 5573 - RNA, 19 nt, Artificial Sequence
  Synthetic
caguaaugauuguggugga

SEQ ID NO: 5574 - RNA, 19 nt, Artificial Sequence
  Synthetic
gggagaugucagugguaca

SEQ ID NO: 5575 - RNA, 19 nt, Artificial Sequence
  Synthetic
aggacagauucucgugaua

SEQ ID NO: 5576 - RNA, 19 nt, Artificial Sequence
  Synthetic
gcaaaugaacuaagagaua

SEQ ID NO: 5577 - RNA, 19 nt, Artificial Sequence
  Synthetic
guagaauaguagaggguuu

SEQ ID NO: 5578 - RNA, 19 nt, Artificial Sequence
  Synthetic
ggauuuuggucaagauuaa

SEQ ID NO: 5579 - RNA, 19 nt, Artificial Sequence
  Synthetic
ccuccuaacuucagguaaa

SEQ ID NO: 5580 - RNA, 19 nt, Artificial Sequence
  Synthetic
ugaacaagcuccagaguuu

SEQ ID NO: 5581 - RNA, 19 nt, Artificial Sequence
  Synthetic
caagaauggugaucagaua

SEQ ID NO: 5582 - RNA, 19 nt, Artificial Sequence
  Synthetic
ccagaaacuuggaugcaaa

SEQ ID NO: 5583 - RNA, 19 nt, Artificial Sequence
  Synthetic
gaaugagaaucaagagaau

SEQ ID NO: 5584 - RNA, 19 nt, Artificial Sequence
  Synthetic
caucaaaugucuuccaaua

SEQ ID NO: 5585 - RNA, 19 nt, Artificial Sequence
  Synthetic
gacgauaagcauugggaaa

SEQ ID NO: 5586 - RNA, 19 nt, Artificial Sequence
  Synthetic
ggaaauacugggaguggua

SEQ ID NO: 5587 - RNA, 19 nt, Artificial Sequence
  Synthetic
cgaaaagcguugacgauaa

SEQ ID NO: 5588 - RNA, 19 nt, Artificial Sequence
  Synthetic
cugaagaaguugauaguca

SEQ ID NO: 5589 - RNA, 19 nt, Artificial Sequence
  Synthetic
ggaugaagaaagugauauu

SEQ ID NO: 5590 - RNA, 19 nt, Artificial Sequence
  Synthetic
gcacagauuuugacaguga

SEQ ID NO: 5591 - RNA, 19 nt, Artificial Sequence
  Synthetic
guccuaaaguggagaguuu

SEQ ID NO: 5592 - RNA, 19 nt, Artificial Sequence
  Synthetic
gcgaagaggacgaggaaac

SEQ ID NO: 5593 - RNA, 19 nt, Artificial Sequence
  Synthetic
guucauaaugccaguguaa

SEQ ID NO: 5594 - RNA, 19 nt, Artificial Sequence
  Synthetic
gaacacugcucuuuggaua

SEQ ID NO: 5595 - RNA, 19 nt, Artificial Sequence
  Synthetic
gccaauaggagaagaauau

SEQ ID NO: 5596 - RNA, 19 nt, Artificial Sequence
  Synthetic
gagaaacucuguugaagaa

SEQ ID NO: 5597 - RNA, 19 nt, Artificial Sequence
  Synthetic
ggccuaugguugagaaauu

SEQ ID NO: 5598 - RNA, 19 nt, Artificial Sequence
  Synthetic
aagauuuacugaagcgaaa

SEQ ID NO: 5599 - RNA, 19 nt, Artificial Sequence
  Synthetic
ugagaagauuggagaugaa

SEQ ID NO: 5600 - RNA, 19 nt, Artificial Sequence
  Synthetic
cugaagaguuugacacauu

SEQ ID NO: 5601 - RNA, 19 nt, Artificial Sequence
  Synthetic
caaguuauuucaaggcaaa

SEQ ID NO: 5602 - RNA, 19 nt, Artificial Sequence
  Synthetic
cuaaaggauuucagacaau

SEQ ID NO: 5603 - RNA, 19 nt, Artificial Sequence
  Synthetic
gagaagaaguggcugugaa

SEQ ID NO: 5604 - RNA, 19 nt, Artificial Sequence
  Synthetic
cuuaguaaauccagaucaa

SEQ ID NO: 5605 - RNA, 19 nt, Artificial Sequence
  Synthetic
gcucaguacugcuguagaa

SEQ ID NO: 5606 - RNA, 19 nt, Artificial Sequence
  Synthetic
gggagaucguggagaacaa

SEQ ID NO: 5607 - RNA, 19 nt, Artificial Sequence
  Synthetic
gggaguugcuggugaagaa

SEQ ID NO: 5608 - RNA, 19 nt, Artificial Sequence
  Synthetic
gugcaacgccacagggaaa

SEQ ID NO: 5609 - RNA, 19 nt, Artificial Sequence
  Synthetic
ugaaggaggugaagaccaa

SEQ ID NO: 5610 - RNA, 19 nt, Artificial Sequence
  Synthetic
uugaaugcguggugagcaa

SEQ ID NO: 5611 - RNA, 19 nt, Artificial Sequence
  Synthetic
agacagagacagugagcca

SEQ ID NO: 5612 - RNA, 19 nt, Artificial Sequence
  Synthetic
acagggagaucguggagaa

SEQ ID NO: 5613 - RNA, 19 nt, Artificial Sequence
  Synthetic
cgaagaaaguggugauccu

SEQ ID NO: 5614 - RNA, 19 nt, Artificial Sequence
  Synthetic
ugaagaacuuggagggcca

SEQ ID NO: 5615 - RNA, 19 nt, Artificial Sequence
  Synthetic
caucacaagcccagaauga

SEQ ID NO: 5616 - RNA, 19 nt, Artificial Sequence
  Synthetic
ggaacauacaccugugaau

SEQ ID NO: 5617 - RNA, 19 nt, Artificial Sequence
  Synthetic
aggccaacgugucggguau

SEQ ID NO: 5618 - RNA, 19 nt, Artificial Sequence
  Synthetic
gcagcaacgugguggggaa

SEQ ID NO: 5619 - RNA, 19 nt, Artificial Sequence
  Synthetic
gggaaguggcgcugaaagu

SEQ ID NO: 5620 - RNA, 19 nt, Artificial Sequence
  Synthetic
guauugagaacgaggacuu

SEQ ID NO: 5621 - RNA, 19 nt, Artificial Sequence
  Synthetic
gaacaacagcagagccaca

SEQ ID NO: 5622 - RNA, 19 nt, Artificial Sequence
  Synthetic
ggacaaagauggccagccu

SEQ ID NO: 5623 - RNA, 19 nt, Artificial Sequence
  Synthetic
gagaacaacagcagagcca

SEQ ID NO: 5624 - RNA, 19 nt, Artificial Sequence
  Synthetic
gggauuguguggugcuuau

SEQ ID NO: 5625 - RNA, 19 nt, Artificial Sequence
  Synthetic
gggcagagaggaaguuuga

SEQ ID NO: 5626 - RNA, 19 nt, Artificial Sequence
  Synthetic
cugggagggcagagaggaa

SEQ ID NO: 5627 - RNA, 19 nt, Artificial Sequence
  Synthetic
ccgcaaggacuucguggua

SEQ ID NO: 5628 - RNA, 19 nt, Artificial Sequence
  Synthetic
guggagaaugugcagguua

SEQ ID NO: 5629 - RNA, 19 nt, Artificial Sequence
  Synthetic
cgguauggccuacggguca

SEQ ID NO: 5630 - RNA, 19 nt, Artificial Sequence
  Synthetic
gggaagccguccugcagua

SEQ ID NO: 5631 - RNA, 19 nt, Artificial Sequence
  Synthetic
gugcaauugagaagagcuu

SEQ ID NO: 5632 - RNA, 19 nt, Artificial Sequence
  Synthetic
guguggugcuuaugggaga

SEQ ID NO: 5633 - RNA, 19 nt, Artificial Sequence
  Synthetic
caacaucaccugggacaaa

SEQ ID NO: 5634 - RNA, 19 nt, Artificial Sequence
  Synthetic
acuuggaggaggugaucaa

SEQ ID NO: 5635 - RNA, 19 nt, Artificial Sequence
  Synthetic
gggagaagaccaaacacuu

SEQ ID NO: 5636 - RNA, 19 nt, Artificial Sequence
  Synthetic
gaaauaugcuagagggaga

SEQ ID NO: 5637 - RNA, 19 nt, Artificial Sequence
  Synthetic
gagacuagaaggagaaaua

SEQ ID NO: 5638 - RNA, 19 nt, Artificial Sequence
  Synthetic
caguaaugagagagagaaa

SEQ ID NO: 5639 - RNA, 19 nt, Artificial Sequence
  Synthetic
gaaucuagacgaaggauaa

SEQ ID NO: 5640 - RNA, 19 nt, Artificial Sequence
  Synthetic
ggauaaacauggcaaacaa

SEQ ID NO: 5641 - RNA, 19 nt, Artificial Sequence
  Synthetic
agccaaaguccgugggaaa

SEQ ID NO: 5642 - RNA, 19 nt, Artificial Sequence
  Synthetic
cagcagacauggaaauaua

SEQ ID NO: 5643 - RNA, 19 nt, Artificial Sequence
  Synthetic
caagaaacccaguuggaaa

SEQ ID NO: 5644 - RNA, 19 nt, Artificial Sequence
  Synthetic
ggacaaagaugccggagau

SEQ ID NO: 5645 - RNA, 19 nt, Artificial Sequence
  Synthetic
gaggaauucugaaguguaa

SEQ ID NO: 5646 - RNA, 19 nt, Artificial Sequence
  Synthetic
gggcuuugccagagaacaa

SEQ ID NO: 5647 - RNA, 19 nt, Artificial Sequence
  Synthetic
ccaaacagaaggauaauua

SEQ ID NO: 5648 - RNA, 19 nt, Artificial Sequence
  Synthetic
caaagaaguuguacaaaca

SEQ ID NO: 5649 - RNA, 19 nt, Artificial Sequence
  Synthetic
aguuggaaauggagaagaa

SEQ ID NO: 5650 - RNA, 19 nt, Artificial Sequence
  Synthetic
cgugaaagcuucugagagu

SEQ ID NO: 5651 - RNA, 19 nt, Artificial Sequence
  Synthetic
guuuacaacuccaagauua

SEQ ID NO: 5652 - RNA, 19 nt, Artificial Sequence
  Synthetic
uuaaagagcuugaggaugu

SEQ ID NO: 5653 - RNA, 19 nt, Artificial Sequence
  Synthetic
gaacgguaccuuagugaua

SEQ ID NO: 5654 - RNA, 19 nt, Artificial Sequence
  Synthetic
cggccaagauugaacacaa

SEQ ID NO: 5655 - RNA, 19 nt, Artificial Sequence
  Synthetic
uggcaaacaaacagauuaa

SEQ ID NO: 5656 - RNA, 19 nt, Artificial Sequence
  Synthetic
gagaagacaucguggagga

SEQ ID NO: 5657 - RNA, 19 nt, Artificial Sequence
  Synthetic
gggaauaggagcucuuaaa

SEQ ID NO: 5658 - RNA, 19 nt, Artificial Sequence
  Synthetic
ggagaaaacugcaucauaa

SEQ ID NO: 5659 - RNA, 19 nt, Artificial Sequence
  Synthetic
acaacaagaucgaguuuau

SEQ ID NO: 5660 - RNA, 19 nt, Artificial Sequence
  Synthetic
caaacaagcaguaucauaa

SEQ ID NO: 5661 - RNA, 19 nt, Artificial Sequence
  Synthetic
ggaaauugauagcauacua

SEQ ID NO: 5662 - RNA, 19 nt, Artificial Sequence
  Synthetic
agaaagacacagugacaau

SEQ ID NO: 5663 - RNA, 19 nt, Artificial Sequence
  Synthetic
ugggagaauuuaaggaaga

SEQ ID NO: 5664 - RNA, 19 nt, Artificial Sequence
  Synthetic
gccaagaaagggagaagaa

SEQ ID NO: 5665 - RNA, 19 nt, Artificial Sequence
  Synthetic
ccugaaauguccacacaaa

SEQ ID NO: 5666 - RNA, 19 nt, Artificial Sequence
  Synthetic
ccgaugagauugugaaacu

SEQ ID NO: 5667 - RNA, 19 nt, Artificial Sequence
  Synthetic
ccaagaagcuggugaacuc

SEQ ID NO: 5668 - RNA, 19 nt, Artificial Sequence
  Synthetic
ggagaagaugggaggcuca

SEQ ID NO: 5669 - RNA, 19 nt, Artificial Sequence
  Synthetic
caccaagcuuccagaacua

SEQ ID NO: 5670 - RNA, 19 nt, Artificial Sequence
  Synthetic
uguuacaaguccugaccaa

SEQ ID NO: 5671 - RNA, 19 nt, Artificial Sequence
  Synthetic
cgguggagaugguggugau

SEQ ID NO: 5672 - RNA, 19 nt, Artificial Sequence
  Synthetic
uuuaagacucccugugaaa

SEQ ID NO: 5673 - RNA, 19 nt, Artificial Sequence
  Synthetic
ggaugagccucuccugaaa

SEQ ID NO: 5674 - RNA, 19 nt, Artificial Sequence
  Synthetic
ucgcaaagcaggugaacgu

SEQ ID NO: 5675 - RNA, 19 nt, Artificial Sequence
  Synthetic
ccuccaagaagcuggugaa

SEQ ID NO: 5676 - RNA, 19 nt, Artificial Sequence
  Synthetic
gggccaucuuggaggucuu

SEQ ID NO: 5677 - RNA, 19 nt, Artificial Sequence
  Synthetic
uggaagccaugcagaagua

SEQ ID NO: 5678 - RNA, 19 nt, Artificial Sequence
  Synthetic
uggaggucuugcagagcua

SEQ ID NO: 5679 - RNA, 19 nt, Artificial Sequence
  Synthetic
caguugugaugauggucaa

SEQ ID NO: 5680 - RNA, 19 nt, Artificial Sequence
  Synthetic
cggaagagccaguuauauc

SEQ ID NO: 5681 - RNA, 19 nt, Artificial Sequence
  Synthetic
cccaggagcugaucuguua

SEQ ID NO: 5682 - RNA, 19 nt, Artificial Sequence
  Synthetic
cgccgaugagauugugaaa

SEQ ID NO: 5683 - RNA, 19 nt, Artificial Sequence
  Synthetic
gggcuggaggagaucgcaa

SEQ ID NO: 5684 - RNA, 19 nt, Artificial Sequence
  Synthetic
ccaccaagcuuccagaacu

SEQ ID NO: 5685 - RNA, 19 nt, Artificial Sequence
  Synthetic
cuucagagauaaggcauuu

SEQ ID NO: 5686 - RNA, 19 nt, Artificial Sequence
  Synthetic
gaaacugauagaugcugaa

SEQ ID NO: 5687 - RNA, 19 nt, Artificial Sequence
  Synthetic
gcuccucaguugugaugau

SEQ ID NO: 5688 - RNA, 19 nt, Artificial Sequence
  Synthetic
ccucuaaguugagcaggaa

SEQ ID NO: 5689 - RNA, 19 nt, Artificial Sequence
  Synthetic
gccgaggccaccaagaaua

SEQ ID NO: 5690 - RNA, 19 nt, Artificial Sequence
  Synthetic
gaccaaagcagucaagagu

SEQ ID NO: 5691 - RNA, 19 nt, Artificial Sequence
  Synthetic
ggacuaugcuggauucucu

SEQ ID NO: 5692 - RNA, 19 nt, Artificial Sequence
  Synthetic
ggaagagccaguuauauca

SEQ ID NO: 5693 - RNA, 19 nt, Artificial Sequence
  Synthetic
ggcaaccgccgaugagauu

SEQ ID NO: 5694 - RNA, 19 nt, Artificial Sequence
  Synthetic
cagccgaggccaccaagaa

SEQ ID NO: 5695 - RNA, 19 nt, Artificial Sequence
  Synthetic
gagcugaucuguuacaagu

SEQ ID NO: 5696 - RNA, 19 nt, Artificial Sequence
  Synthetic
ggaagaagaugcuguggaa

SEQ ID NO: 5697 - RNA, 19 nt, Artificial Sequence
  Synthetic
ccuggaaguuguagcaaua

SEQ ID NO: 5698 - RNA, 19 nt, Artificial Sequence
  Synthetic
gaacuaaagaggaugauau

SEQ ID NO: 5699 - RNA, 19 nt, Artificial Sequence
  Synthetic
gauuaugacagcacagaaa

SEQ ID NO: 5700 - RNA, 19 nt, Artificial Sequence
  Synthetic
gaauagugccaaaguuuaa

SEQ ID NO: 5701 - RNA, 19 nt, Artificial Sequence
  Synthetic
gccaagacgcuaugugaaa

SEQ ID NO: 5702 - RNA, 19 nt, Artificial Sequence
  Synthetic
ggaacgagccaguaccaaa

SEQ ID NO: 5703 - RNA, 19 nt, Artificial Sequence
  Synthetic
uaaagaugauggugccaaa

SEQ ID NO: 5704 - RNA, 19 nt, Artificial Sequence
  Synthetic
gggcugagcuccagggaaa

SEQ ID NO: 5705 - RNA, 19 nt, Artificial Sequence
  Synthetic
aggagaaggcugugcacaa

SEQ ID NO: 5706 - RNA, 19 nt, Artificial Sequence
  Synthetic
ugaugaaguuugcggagaa

SEQ ID NO: 5707 - RNA, 19 nt, Artificial Sequence
  Synthetic
ggauagaggaagaagagga

SEQ ID NO: 5708 - RNA, 19 nt, Artificial Sequence
  Synthetic
cagaagugggauugagaca

SEQ ID NO: 5709 - RNA, 19 nt, Artificial Sequence
  Synthetic
aggaagaagaggaggugga

SEQ ID NO: 5710 - RNA, 19 nt, Artificial Sequence
  Synthetic
gagaauaacuggucgcucu

SEQ ID NO: 5711 - RNA, 19 nt, Artificial Sequence
  Synthetic
gcagaaagccucagcccau

SEQ ID NO: 5712 - RNA, 19 nt, Artificial Sequence
  Synthetic
gaagugggauugagacauu

SEQ ID NO: 5713 - RNA, 19 nt, Artificial Sequence
  Synthetic
ggaggaugacagugaucaa

SEQ ID NO: 5714 - RNA, 19 nt, Artificial Sequence
  Synthetic
aagaagaggagguggagca

SEQ ID NO: 5715 - RNA, 19 nt, Artificial Sequence
  Synthetic
ggagaaggcugugcacaaa

SEQ ID NO: 5716 - RNA, 19 nt, Artificial Sequence
  Synthetic
cagcgaggguggagaguac

SEQ ID NO: 5717 - RNA, 19 nt, Artificial Sequence
  Synthetic
cugcacaacuggaucgaca

SEQ ID NO: 5718 - RNA, 19 nt, Artificial Sequence
  Synthetic
aagaggagguggagcagga

SEQ ID NO: 5719 - RNA, 19 nt, Artificial Sequence
  Synthetic
gagagcaccaagaggaaga

SEQ ID NO: 5720 - RNA, 19 nt, Artificial Sequence
  Synthetic
gcaccuaugcugugaaaau

SEQ ID NO: 5721 - RNA, 19 nt, Artificial Sequence
  Synthetic
agucacaggccaagauaga

SEQ ID NO: 5722 - RNA, 19 nt, Artificial Sequence
  Synthetic
aggagguggagcaggaauu

SEQ ID NO: 5723 - RNA, 19 nt, Artificial Sequence
  Synthetic
ccagguaugcacagguaau

SEQ ID NO: 5724 - RNA, 19 nt, Artificial Sequence
  Synthetic
gcucacagugccagcgaga

SEQ ID NO: 5725 - RNA, 19 nt, Artificial Sequence
  Synthetic
cuuccaagucacaggccaa

SEQ ID NO: 5726 - RNA, 19 nt, Artificial Sequence
  Synthetic
gcagugacuuuguggagca

SEQ ID NO: 5727 - RNA, 19 nt, Artificial Sequence
  Synthetic
cugagagcaccaagaggaa

SEQ ID NO: 5728 - RNA, 19 nt, Artificial Sequence
  Synthetic
gggcagaacagcaaaguug

SEQ ID NO: 5729 - RNA, 19 nt, Artificial Sequence
  Synthetic
gggcagcuuccgaggugua

SEQ ID NO: 5730 - RNA, 19 nt, Artificial Sequence
  Synthetic
caaggacagaagugggauu

SEQ ID NO: 5731 - RNA, 19 nt, Artificial Sequence
  Synthetic
caggagagcuuccgccaga

SEQ ID NO: 5732 - RNA, 19 nt, Artificial Sequence
  Synthetic
acaacuggaucgacaugaa

SEQ ID NO: 5733 - RNA, 19 nt, Artificial Sequence
  Synthetic
gaaucucacuuuagcuauu

SEQ ID NO: 5734 - RNA, 19 nt, Artificial Sequence
  Synthetic
ggaaugaaaugaaggaaua

SEQ ID NO: 5735 - RNA, 19 nt, Artificial Sequence
  Synthetic
uaaaagaguugaagggaaa

SEQ ID NO: 5736 - RNA, 19 nt, Artificial Sequence
  Synthetic
gcacauaugcgcucaauaa

SEQ ID NO: 5737 - RNA, 19 nt, Artificial Sequence
  Synthetic
gaguauauguucuuggaau

SEQ ID NO: 5738 - RNA, 19 nt, Artificial Sequence
  Synthetic
aggaauauucugaugcaaa

SEQ ID NO: 5739 - RNA, 19 nt, Artificial Sequence
  Synthetic
aaucugauauggaaggaua

SEQ ID NO: 5740 - RNA, 19 nt, Artificial Sequence
  Synthetic
aaguauaucacaucggaaa

SEQ ID NO: 5741 - RNA, 19 nt, Artificial Sequence
  Synthetic
uaggaaauguagaaaccaa

SEQ ID NO: 5742 - RNA, 19 nt, Artificial Sequence
  Synthetic
ccuagaagcugccauuaaa

SEQ ID NO: 5743 - RNA, 19 nt, Artificial Sequence
  Synthetic
cauccugagcuaagacaua

SEQ ID NO: 5744 - RNA, 19 nt, Artificial Sequence
  Synthetic
gguuggaggagaacuauaa

SEQ ID NO: 5745 - RNA, 19 nt, Artificial Sequence
  Synthetic
cccaguagcugcacacaua

SEQ ID NO: 5746 - RNA, 19 nt, Artificial Sequence
  Synthetic
gcaucagaguggagagccu

SEQ ID NO: 5747 - RNA, 19 nt, Artificial Sequence
  Synthetic
agcaggacauggaggaaau

SEQ ID NO: 5748 - RNA, 19 nt, Artificial Sequence
  Synthetic
gagauaauguacaauguca

SEQ ID NO: 5749 - RNA, 19 nt, Artificial Sequence
  Synthetic
caaaggagguuuuagaacu

SEQ ID NO: 5750 - RNA, 19 nt, Artificial Sequence
  Synthetic
ggacacaaagggagaaaug

SEQ ID NO: 5751 - RNA, 19 nt, Artificial Sequence
  Synthetic
cuucuaagcccaagagugu

SEQ ID NO: 5752 - RNA, 19 nt, Artificial Sequence
  Synthetic
gccuagaagcugccauuaa

SEQ ID NO: 5753 - RNA, 19 nt, Artificial Sequence
  Synthetic
ugcuaagcucuguggauua

SEQ ID NO: 5754 - RNA, 19 nt, Artificial Sequence
  Synthetic
guggauuaggccuggcuua

SEQ ID NO: 5755 - RNA, 19 nt, Artificial Sequence
  Synthetic
ggacauggauucuugaucu

SEQ ID NO: 5756 - RNA, 19 nt, Artificial Sequence
  Synthetic
gcaagaaggcuuaguagcu

SEQ ID NO: 5757 - RNA, 19 nt, Artificial Sequence
  Synthetic
ucuaagcccaagaguguua

SEQ ID NO: 5758 - RNA, 19 nt, Artificial Sequence
  Synthetic
gaagcaguaugaagugauu

SEQ ID NO: 5759 - RNA, 19 nt, Artificial Sequence
  Synthetic
acaaagaacucaacagcag

SEQ ID NO: 5760 - RNA, 19 nt, Artificial Sequence
  Synthetic
gcaucuccaaagaaggaaa

SEQ ID NO: 5761 - RNA, 19 nt, Artificial Sequence
  Synthetic
cauauugcauccaaaggaa

SEQ ID NO: 5762 - RNA, 19 nt, Artificial Sequence
  Synthetic
gcucaggauuacagauaug

SEQ ID NO: 5763 - RNA, 19 nt, Artificial Sequence
  Synthetic
ggagaacuauaacggaaaa

SEQ ID NO: 5764 - RNA, 19 nt, Artificial Sequence
  Synthetic
gagaagaacuuaucagaga

SEQ ID NO: 5765 - RNA, 19 nt, Artificial Sequence
  Synthetic
agaagauggagaaggaaua

SEQ ID NO: 5766 - RNA, 19 nt, Artificial Sequence
  Synthetic
caacauuguaggaggagaa

SEQ ID NO: 5767 - RNA, 19 nt, Artificial Sequence
  Synthetic
cagaagaacaagccagaaa

SEQ ID NO: 5768 - RNA, 19 nt, Artificial Sequence
  Synthetic
ggagaugacucaaguauuu

SEQ ID NO: 5769 - RNA, 19 nt, Artificial Sequence
  Synthetic
gcccuaguguagagaaaua

SEQ ID NO: 5770 - RNA, 19 nt, Artificial Sequence
  Synthetic
caagauacccagagagcau

SEQ ID NO: 5771 - RNA, 19 nt, Artificial Sequence
  Synthetic
gcgucuaacagaagaacaa

SEQ ID NO: 5772 - RNA, 19 nt, Artificial Sequence
  Synthetic
agaaguuacucaugaagaa

SEQ ID NO: 5773 - RNA, 19 nt, Artificial Sequence
  Synthetic
ccauagaacggguuauuaa

SEQ ID NO: 5774 - RNA, 19 nt, Artificial Sequence
  Synthetic
gaauaagcgucuaacagaa

SEQ ID NO: 5775 - RNA, 19 nt, Artificial Sequence
  Synthetic
aggagaagauggagaagga

SEQ ID NO: 5776 - RNA, 19 nt, Artificial Sequence
  Synthetic
gguagauggaagagauuau

SEQ ID NO: 5777 - RNA, 19 nt, Artificial Sequence
  Synthetic
ccuaugaaagacaggauaa

SEQ ID NO: 5778 - RNA, 19 nt, Artificial Sequence
  Synthetic
gaaacagaucauagaagaa

SEQ ID NO: 5779 - RNA, 19 nt, Artificial Sequence
  Synthetic
gagaagauggagaaggaau

SEQ ID NO: 5780 - RNA, 19 nt, Artificial Sequence
  Synthetic
uccuaaaggucuuggguuu

SEQ ID NO: 5781 - RNA, 19 nt, Artificial Sequence
  Synthetic
acuucagauuggagauaaa

SEQ ID NO: 5782 - RNA, 19 nt, Artificial Sequence
  Synthetic
agaacaaggaccagaguga

SEQ ID NO: 5783 - RNA, 19 nt, Artificial Sequence
  Synthetic
uaucagagauugagaaugu

SEQ ID NO: 5784 - RNA, 19 nt, Artificial Sequence
  Synthetic
caagagagcagauggaaaa

SEQ ID NO: 5785 - RNA, 19 nt, Artificial Sequence
  Synthetic
ccaccauaccacaggcaaa

SEQ ID NO: 5786 - RNA, 19 nt, Artificial Sequence
  Synthetic
ccucauacaacuagaccaa

SEQ ID NO: 5787 - RNA, 19 nt, Artificial Sequence
  Synthetic
ucaagagagcagauggaaa

SEQ ID NO: 5788 - RNA, 19 nt, Artificial Sequence
  Synthetic
guauaugaaugauggcuau

SEQ ID NO: 5789 - RNA, 19 nt, Artificial Sequence
  Synthetic
uggaaaugccauaaagaga

SEQ ID NO: 5790 - RNA, 19 nt, Artificial Sequence
  Synthetic
ugaugaaauuacaagggaa

SEQ ID NO: 5791 - RNA, 19 nt, Artificial Sequence
  Synthetic
aagccaaacugaagacaga

SEQ ID NO: 5792 - RNA, 19 nt, Artificial Sequence
  Synthetic
caguugaagcguugaaaga

SEQ ID NO: 5793 - RNA, 19 nt, Artificial Sequence
  Synthetic
gacuaaagacagugggcuu

SEQ ID NO: 5794 - RNA, 19 nt, Artificial Sequence
  Synthetic
gaacaaauggagaaagaua

SEQ ID NO: 5795 - RNA, 19 nt, Artificial Sequence
  Synthetic
ggacuaacgugaagaagua

SEQ ID NO: 5796 - RNA, 19 nt, Artificial Sequence
  Synthetic
gagaacaaauggagaaaga

SEQ ID NO: 5797 - RNA, 19 nt, Artificial Sequence
  Synthetic
ggacagaaauugaauauga

SEQ ID NO: 5798 - RNA, 19 nt, Artificial Sequence
  Synthetic
cgaagaggcaguagcaaua

SEQ ID NO: 5799 - RNA, 19 nt, Artificial Sequence
  Synthetic
ggacagacagugacgauua

SEQ ID NO: 5800 - RNA, 19 nt, Artificial Sequence
  Synthetic
ggagaauauuuuacagcua

SEQ ID NO: 5801 - RNA, 19 nt, Artificial Sequence
  Synthetic
gagucaugcuggagggaga

SEQ ID NO: 5802 - RNA, 19 nt, Artificial Sequence
  Synthetic
gaacaagaauuuggagaau

SEQ ID NO: 5803 - RNA, 19 nt, Artificial Sequence
  Synthetic
aaaggaggguggaaagaaa

SEQ ID NO: 5804 - RNA, 19 nt, Artificial Sequence
  Synthetic
caauuaagcuagaacaaga

SEQ ID NO: 5805 - RNA, 19 nt, Artificial Sequence
  Synthetic
gagcagagugagcaggaaa

SEQ ID NO: 5806 - RNA, 19 nt, Artificial Sequence
  Synthetic
ccagagaacaaauggagaa

SEQ ID NO: 5807 - RNA, 19 nt, Artificial Sequence
  Synthetic
gggaagauggagaagguau

SEQ ID NO: 5808 - RNA, 19 nt, Artificial Sequence
  Synthetic
agaacaagaauuuggagaa

SEQ ID NO: 5809 - RNA, 19 nt, Artificial Sequence
  Synthetic
ggaagauggagaagguauu

SEQ ID NO: 5810 - RNA, 19 nt, Artificial Sequence
  Synthetic
gcuuguuauugaagagcaa

SEQ ID NO: 5811 - RNA, 19 nt, Artificial Sequence
  Synthetic
agaagagcauuuagaagaa

SEQ ID NO: 5812 - RNA, 19 nt, Artificial Sequence
  Synthetic
ugccaaaccuggagugauu

SEQ ID NO: 5813 - RNA, 19 nt, Artificial Sequence
  Synthetic
caucagagguaguuuauuu

SEQ ID NO: 5814 - RNA, 19 nt, Artificial Sequence
  Synthetic
gcaaguaggagauagacua

SEQ ID NO: 5815 - RNA, 19 nt, Artificial Sequence
  Synthetic
gugaacaaacuaugugaua

SEQ ID NO: 5816 - RNA, 19 nt, Artificial Sequence
  Synthetic
uuacaaggcaggaaauaaa

SEQ ID NO: 5817 - RNA, 19 nt, Artificial Sequence
  Synthetic
agaacaaggagcagaguga

SEQ ID NO: 5818 - RNA, 19 nt, Artificial Sequence
  Synthetic
cagaagagcauuuagaaga

SEQ ID NO: 5819 - RNA, 19 nt, Artificial Sequence
  Synthetic
gcaagguaguccugcacaa

SEQ ID NO: 5820 - RNA, 19 nt, Artificial Sequence
  Synthetic
ggagauacuuuagaagaua

SEQ ID NO: 5821 - RNA, 19 nt, Artificial Sequence
  Synthetic
ccucaaaggaaaaguuaua

SEQ ID NO: 5822 - RNA, 19 nt, Artificial Sequence
  Synthetic
ugucauuuccagagaacaa

SEQ ID NO: 5823 - RNA, 19 nt, Artificial Sequence
  Synthetic
uagaaaauguccauggaua

SEQ ID NO: 5824 - RNA, 19 nt, Artificial Sequence
  Synthetic
aagcagaagugaagagaaa

SEQ ID NO: 5825 - RNA, 19 nt, Artificial Sequence
  Synthetic
agaaagagcucgauugaaa

SEQ ID NO: 5826 - RNA, 19 nt, Artificial Sequence
  Synthetic
agaaagauauucaggacaa

SEQ ID NO: 5827 - RNA, 19 nt, Artificial Sequence
  Synthetic
caaagaaccugaaaggaca

SEQ ID NO: 5828 - RNA, 19 nt, Artificial Sequence
  Synthetic
guaagaagaggguggaaaa

SEQ ID NO: 5829 - RNA, 19 nt, Artificial Sequence
  Synthetic
ccaugaaacuggagcagga

SEQ ID NO: 5830 - RNA, 19 nt, Artificial Sequence
  Synthetic
cggcaaugcuaucaagaga

SEQ ID NO: 5831 - RNA, 19 nt, Artificial Sequence
  Synthetic
gcaaauaagaucuaugaca

SEQ ID NO: 5832 - RNA, 19 nt, Artificial Sequence
  Synthetic
gaaaugaaccgaaggcaga

SEQ ID NO: 5833 - RNA, 19 nt, Artificial Sequence
  Synthetic
ccugaaaggacaagaggau

SEQ ID NO: 5834 - RNA, 19 nt, Artificial Sequence
  Synthetic
aguacagaccugaagaaua

SEQ ID NO: 5835 - RNA, 19 nt, Artificial Sequence
  Synthetic
agacauaugaacaagcaaa

SEQ ID NO: 5836 - RNA, 19 nt, Artificial Sequence
  Synthetic
cugaagaacacaucugaua

SEQ ID NO: 5837 - RNA, 19 nt, Artificial Sequence
  Synthetic
guacagaccugaagaauac

SEQ ID NO: 5838 - RNA, 19 nt, Artificial Sequence
  Synthetic
gguuaagugacgauuauua

SEQ ID NO: 5839 - RNA, 19 nt, Artificial Sequence
  Synthetic
caucguaggaggagaggau

SEQ ID NO: 5840 - RNA, 19 nt, Artificial Sequence
  Synthetic
gcaagaucauccugcacaa

SEQ ID NO: 5841 - RNA, 19 nt, Artificial Sequence
  Synthetic
ggauggacgccuacagauu

SEQ ID NO: 5842 - RNA, 19 nt, Artificial Sequence
  Synthetic
auaaugagguggauggaca

SEQ ID NO: 5843 - RNA, 19 nt, Artificial Sequence
  Synthetic
cgguggaggcgcugaaaga

SEQ ID NO: 5844 - RNA, 19 nt, Artificial Sequence
  Synthetic
gaugagugguggcaggcaa

SEQ ID NO: 5845 - RNA, 19 nt, Artificial Sequence
  Synthetic
aguaagaagaggguggaaa

SEQ ID NO: 5846 - RNA, 19 nt, Artificial Sequence
  Synthetic
gcaaagaaccugaaaggac

SEQ ID NO: 5847 - RNA, 19 nt, Artificial Sequence
  Synthetic
gcaggaauuuggagaguac

SEQ ID NO: 5848 - RNA, 19 nt, Artificial Sequence
  Synthetic
guaagugcccugagugcua

SEQ ID NO: 5849 - RNA, 19 nt, Artificial Sequence
  Synthetic
acucacuggaagagauuua

SEQ ID NO: 5850 - RNA, 19 nt, Artificial Sequence
  Synthetic
gcaccaaggccaagcucau

SEQ ID NO: 5851 - RNA, 19 nt, Artificial Sequence
  Synthetic
gaacaaaugaugaacagca

SEQ ID NO: 5852 - RNA, 19 nt, Artificial Sequence
  Synthetic
cgagaguggucaagguuaa

SEQ ID NO: 5853 - RNA, 19 nt, Artificial Sequence
  Synthetic
agaaugugcuagagauuaa

SEQ ID NO: 5854 - RNA, 19 nt, Artificial Sequence
  Synthetic
ggucaagguuaaaggccaa

SEQ ID NO: 5855 - RNA, 19 nt, Artificial Sequence
  Synthetic
gagaggaacugcaggaauu

SEQ ID NO: 5856 - RNA, 19 nt, Artificial Sequence
  Synthetic
ggagaaugugcuagagauu

SEQ ID NO: 5857 - RNA, 19 nt, Artificial Sequence
  Synthetic
gcagagacauggaaagaca

SEQ ID NO: 5858 - RNA, 19 nt, Artificial Sequence
  Synthetic
gaggaaaucacauuggaaa

SEQ ID NO: 5859 - RNA, 19 nt, Artificial Sequence
  Synthetic
gauaugaguugcaggugaa

SEQ ID NO: 5860 - RNA, 19 nt, Artificial Sequence
  Synthetic
ggauaugaguugcagguga

SEQ ID NO: 5861 - RNA, 19 nt, Artificial Sequence
  Synthetic
aguauaaaccagaagagua

SEQ ID NO: 5862 - RNA, 19 nt, Artificial Sequence
  Synthetic
ccgcaaagccuucgacaga

SEQ ID NO: 5863 - RNA, 19 nt, Artificial Sequence
  Synthetic
agauggaauacgaggaaau

SEQ ID NO: 5864 - RNA, 19 nt, Artificial Sequence
  Synthetic
ccaccaagcuggagcagga

SEQ ID NO: 5865 - RNA, 19 nt, Artificial Sequence
  Synthetic
ugaaaggaagagacagaua

SEQ ID NO: 5866 - RNA, 19 nt, Artificial Sequence
  Synthetic
cugagaaggucauggagau

SEQ ID NO: 5867 - RNA, 19 nt, Artificial Sequence
  Synthetic
gcacaucccaggagauaau

SEQ ID NO: 5868 - RNA, 19 nt, Artificial Sequence
  Synthetic
gggagaaaauggagaagga

SEQ ID NO: 5869 - RNA, 19 nt, Artificial Sequence
  Synthetic
cagccaucguggaggguga

SEQ ID NO: 5870 - RNA, 19 nt, Artificial Sequence
  Synthetic
gagauuaacaagcggauca

SEQ ID NO: 5871 - RNA, 19 nt, Artificial Sequence
  Synthetic
gguuccagcccgagagaga

SEQ ID NO: 5872 - RNA, 19 nt, Artificial Sequence
  Synthetic
ggagauggaauacgaggaa

SEQ ID NO: 5873 - RNA, 19 nt, Artificial Sequence
  Synthetic
guauaaaccagaagaguac

SEQ ID NO: 5874 - RNA, 19 nt, Artificial Sequence
  Synthetic
gguuaaaggccaaggacug

SEQ ID NO: 5875 - RNA, 19 nt, Artificial Sequence
  Synthetic
agaaggucauggagaucaa

SEQ ID NO: 5876 - RNA, 19 nt, Artificial Sequence
  Synthetic
ccuagaagccccaggauau

SEQ ID NO: 5877 - RNA, 19 nt, Artificial Sequence
  Synthetic
ggaggauuagggagauuaa

SEQ ID NO: 5878 - RNA, 19 nt, Artificial Sequence
  Synthetic
gaaagagaaguguaaggua

SEQ ID NO: 5879 - RNA, 19 nt, Artificial Sequence
  Synthetic
gagcaggaguucacagagu

SEQ ID NO: 5880 - RNA, 19 nt, Artificial Sequence
  Synthetic
gagaaaauggagaaggaca

SEQ ID NO: 5881 - RNA, 19 nt, Artificial Sequence
  Synthetic
gagauuaaagugagagaag

SEQ ID NO: 5882 - RNA, 19 nt, Artificial Sequence
  Synthetic
agagagaaguggccagaga

SEQ ID NO: 5883 - RNA, 19 nt, Artificial Sequence
  Synthetic
ccauggaaguggaggccga

SEQ ID NO: 5884 - RNA, 19 nt, Artificial Sequence
  Synthetic
cggcggagaccuauggcaa

SEQ ID NO: 5885 - RNA, 19 nt, Artificial Sequence
  Synthetic
gcagguucuucuugaaauu

SEQ ID NO: 5886 - RNA, 19 nt, Artificial Sequence
  Synthetic
gcaagaucguccacuacaa

SEQ ID NO: 5887 - RNA, 19 nt, Artificial Sequence
  Synthetic
ccuuccaggaugagaacua

SEQ ID NO: 5888 - RNA, 19 nt, Artificial Sequence
  Synthetic
agagggacguguuggugaa

SEQ ID NO: 5889 - RNA, 19 nt, Artificial Sequence
  Synthetic
cgacauuccucgguauuua

SEQ ID NO: 5890 - RNA, 19 nt, Artificial Sequence
  Synthetic
gggacgacuucgagauucu

SEQ ID NO: 5891 - RNA, 19 nt, Artificial Sequence
  Synthetic
ggugguugcuacuggguca

SEQ ID NO: 5892 - RNA, 19 nt, Artificial Sequence
  Synthetic
agguagcgguagugaagau

SEQ ID NO: 5893 - RNA, 19 nt, Artificial Sequence
  Synthetic
ugaaacagcugaaguggca

SEQ ID NO: 5894 - RNA, 19 nt, Artificial Sequence
  Synthetic
gcacggacaaccagaacuu

SEQ ID NO: 5895 - RNA, 19 nt, Artificial Sequence
  Synthetic
gcuucuaccuggcggagau

SEQ ID NO: 5896 - RNA, 19 nt, Artificial Sequence
  Synthetic
cagugugacagcugagauu

SEQ ID NO: 5897 - RNA, 19 nt, Artificial Sequence
  Synthetic
guguauucgccuaugaaau

SEQ ID NO: 5898 - RNA, 19 nt, Artificial Sequence
  Synthetic
acaucaaacccgacaacau

SEQ ID NO: 5899 - RNA, 19 nt, Artificial Sequence
  Synthetic
uagcgguagugaagaugaa

SEQ ID NO: 5900 - RNA, 19 nt, Artificial Sequence
  Synthetic
gcaaagcuuucuugugcau

SEQ ID NO: 5901 - RNA, 19 nt, Artificial Sequence
  Synthetic
guguaugccaugaagauca

SEQ ID NO: 5902 - RNA, 19 nt, Artificial Sequence
  Synthetic
aggaagcccuggaggagga

SEQ ID NO: 5903 - RNA, 19 nt, Artificial Sequence
  Synthetic
gaacuucgccagucaacua

SEQ ID NO: 5904 - RNA, 19 nt, Artificial Sequence
  Synthetic
cggagauugucauggccau

SEQ ID NO: 5905 - RNA, 19 nt, Artificial Sequence
  Synthetic
gcgagguagcgguagugaa

SEQ ID NO: 5906 - RNA, 19 nt, Artificial Sequence
  Synthetic
gggcagguucuucuugaaa

SEQ ID NO: 5907 - RNA, 19 nt, Artificial Sequence
  Synthetic
gcggagaccuauggcaaga

SEQ ID NO: 5908 - RNA, 19 nt, Artificial Sequence
  Synthetic
augaaauguucuaugggca

SEQ ID NO: 5909 - RNA, 19 nt, Artificial Sequence
  Synthetic
gaaccgggaccuagaggca

SEQ ID NO: 5910 - RNA, 19 nt, Artificial Sequence
  Synthetic
guagugaagaugaagcaga

SEQ ID NO: 5911 - RNA, 19 nt, Artificial Sequence
  Synthetic
aggacaaguacguggccga

SEQ ID NO: 5912 - RNA, 19 nt, Artificial Sequence
  Synthetic
ucgagaaggucuagagaaa

SEQ ID NO: 5913 - RNA, 19 nt, Artificial Sequence
  Synthetic
agagaaagcacaaagauua

SEQ ID NO: 5914 - RNA, 19 nt, Artificial Sequence
  Synthetic
gcuuauuaucggagggcua

SEQ ID NO: 5915 - RNA, 19 nt, Artificial Sequence
  Synthetic
ugauaauacugaagcguuu

SEQ ID NO: 5916 - RNA, 19 nt, Artificial Sequence
  Synthetic
aaaugcagauguugagaaa

SEQ ID NO: 5917 - RNA, 19 nt, Artificial Sequence
  Synthetic
cagauaacuuccagaauga

SEQ ID NO: 5918 - RNA, 19 nt, Artificial Sequence
  Synthetic
gcacaaagauuauugaaac

SEQ ID NO: 5919 - RNA, 19 nt, Artificial Sequence
  Synthetic
cguucaaaggagaggauuu

SEQ ID NO: 5920 - RNA, 19 nt, Artificial Sequence
  Synthetic
gagaaagcacaaagauuau

SEQ ID NO: 5921 - RNA, 19 nt, Artificial Sequence
  Synthetic
agaaggagaaccuaggaaa

SEQ ID NO: 5922 - RNA, 19 nt, Artificial Sequence
  Synthetic
guacgaaggugcugaaugu

SEQ ID NO: 5923 - RNA, 19 nt, Artificial Sequence
  Synthetic
gcucaggaacacaaugaaa

SEQ ID NO: 5924 - RNA, 19 nt, Artificial Sequence
  Synthetic
cugaugaaaugcagcguuu

SEQ ID NO: 5925 - RNA, 19 nt, Artificial Sequence
  Synthetic
gaguaaaugcagauguuga

SEQ ID NO: 5926 - RNA, 19 nt, Artificial Sequence
  Synthetic
gauccagaaaugagaaaga

SEQ ID NO: 5927 - RNA, 19 nt, Artificial Sequence
  Synthetic
ggacuucacugcagcaaga

SEQ ID NO: 5928 - RNA, 19 nt, Artificial Sequence
  Synthetic
uagagaaagcacaaagauu

SEQ ID NO: 5929 - RNA, 19 nt, Artificial Sequence
  Synthetic
ugauagaggaaauguauga

SEQ ID NO: 5930 - RNA, 19 nt, Artificial Sequence
  Synthetic
cagaaaugagaaagaaguu

SEQ ID NO: 5931 - RNA, 19 nt, Artificial Sequence
  Synthetic
gcagauucgagaaggucua

SEQ ID NO: 5932 - RNA, 19 nt, Artificial Sequence
  Synthetic
ccugauaacuauauugcuu

SEQ ID NO: 5933 - RNA, 19 nt, Artificial Sequence
  Synthetic
ggagaaccuaggaaagcua

SEQ ID NO: 5934 - RNA, 19 nt, Artificial Sequence
  Synthetic
gguuuguucugaaguuuua

SEQ ID NO: 5935 - RNA, 19 nt, Artificial Sequence
  Synthetic
acagagaggucacuuauua

SEQ ID NO: 5936 - RNA, 19 nt, Artificial Sequence
  Synthetic
gcagaaacgagauuauuau

SEQ ID NO: 5937 - RNA, 19 nt, Artificial Sequence
  Synthetic
uguuugggaugcagaacua

SEQ ID NO: 5938 - RNA, 19 nt, Artificial Sequence
  Synthetic
uuaugaaacugcucaggaa

SEQ ID NO: 5939 - RNA, 19 nt, Artificial Sequence
  Synthetic
gggaaugucuuaaacuuga

SEQ ID NO: 5940 - RNA, 19 nt, Artificial Sequence
  Synthetic
guugaagcuauuaggguuu

SEQ ID NO: 5941 - RNA, 19 nt, Artificial Sequence
  Synthetic
gcucaaaucuaauccaagu

SEQ ID NO: 5942 - RNA, 19 nt, Artificial Sequence
  Synthetic
gggugaaggaggagggcua

SEQ ID NO: 5943 - RNA, 19 nt, Artificial Sequence
  Synthetic
ggcagaaggcccagggaaa

SEQ ID NO: 5944 - RNA, 19 nt, Artificial Sequence
  Synthetic
ggaucaaagaagaugguua

SEQ ID NO: 5945 - RNA, 19 nt, Artificial Sequence
  Synthetic
accaagagguggaggaaga

SEQ ID NO: 5946 - RNA, 19 nt, Artificial Sequence
  Synthetic
cagaaugggugcaguuuga

SEQ ID NO: 5947 - RNA, 19 nt, Artificial Sequence
  Synthetic
caaagaagaugguuagaac

SEQ ID NO: 5948 - RNA, 19 nt, Artificial Sequence
  Synthetic
gugcagacgcugugccgaa

SEQ ID NO: 5949 - RNA, 19 nt, Artificial Sequence
  Synthetic
ggucagaaugggugcaguu

SEQ ID NO: 5950 - RNA, 19 nt, Artificial Sequence
  Synthetic
ccaaagaggaucccaucua

SEQ ID NO: 5951 - RNA, 19 nt, Artificial Sequence
  Synthetic
gggaguacaacggaagaaa

SEQ ID NO: 5952 - RNA, 19 nt, Artificial Sequence
  Synthetic
guucuuugccagagaccua

SEQ ID NO: 5953 - RNA, 19 nt, Artificial Sequence
  Synthetic
ggaccaagagguggaggaa

SEQ ID NO: 5954 - RNA, 19 nt, Artificial Sequence
  Synthetic
gagagggaguacaacggaa

SEQ ID NO: 5955 - RNA, 19 nt, Artificial Sequence
  Synthetic
ggcaggagagggaguacaa

SEQ ID NO: 5956 - RNA, 19 nt, Artificial Sequence
  Synthetic
gaucaaagaagaugguuag

SEQ ID NO: 5957 - RNA, 19 nt, Artificial Sequence
  Synthetic
cccuggagaugcuggagaa

SEQ ID NO: 5958 - RNA, 19 nt, Artificial Sequence
  Synthetic
gggucaagucagagggcuc

SEQ ID NO: 5959 - RNA, 19 nt, Artificial Sequence
  Synthetic
ggguaacggugcagaggac

SEQ ID NO: 5960 - RNA, 19 nt, Artificial Sequence
  Synthetic
gcaaggcugagguggcuaa

SEQ ID NO: 5961 - RNA, 19 nt, Artificial Sequence
  Synthetic
cggaagaaaccucucuauu

SEQ ID NO: 5962 - RNA, 19 nt, Artificial Sequence
  Synthetic
uggagaugcuggagaacuc

SEQ ID NO: 5963 - RNA, 19 nt, Artificial Sequence
  Synthetic
ucgaguucuuugaccauaa

SEQ ID NO: 5964 - RNA, 19 nt, Artificial Sequence
  Synthetic
gggaccaagagguggagga

SEQ ID NO: 5965 - RNA, 19 nt, Artificial Sequence
  Synthetic
ccuuagacucccugcgcau

SEQ ID NO: 5966 - RNA, 19 nt, Artificial Sequence
  Synthetic
agaccugggccgugcucua

SEQ ID NO: 5967 - RNA, 19 nt, Artificial Sequence
  Synthetic
cacuagggaucaaagaaga

SEQ ID NO: 5968 - RNA, 19 nt, Artificial Sequence
  Synthetic
ggaaggacaaucccaggaa

SEQ ID NO: 5969 - RNA, 19 nt, Artificial Sequence
  Synthetic
ugccagagaccuauuuaaa

SEQ ID NO: 5970 - RNA, 19 nt, Artificial Sequence
  Synthetic
gggacaaggucauguucuc

SEQ ID NO: 5971 - RNA, 19 nt, Artificial Sequence
  Synthetic
gcacuagggaucaaagaag

SEQ ID NO: 5972 - RNA, 19 nt, Artificial Sequence
  Synthetic
ccggaaagaucaacugaaa

SEQ ID NO: 5973 - RNA, 19 nt, Artificial Sequence
  Synthetic
gaacaagugccguuaauua

SEQ ID NO: 5974 - RNA, 19 nt, Artificial Sequence
  Synthetic
ggaaagaucaacugaaauc

SEQ ID NO: 5975 - RNA, 19 nt, Artificial Sequence
  Synthetic
gggaacaagugccguuaau

SEQ ID NO: 5976 - RNA, 19 nt, Artificial Sequence
  Synthetic
aaagugacguggaggauca

SEQ ID NO: 5977 - RNA, 19 nt, Artificial Sequence
  Synthetic
ucauagugcuggagggcgu

SEQ ID NO: 5978 - RNA, 19 nt, Artificial Sequence
  Synthetic
cggaaagaucaacugaaau

SEQ ID NO: 5979 - RNA, 19 nt, Artificial Sequence
  Synthetic
cguuuggccaugagcgcua

SEQ ID NO: 5980 - RNA, 19 nt, Artificial Sequence
  Synthetic
gcaucgaagcuguccauga

SEQ ID NO: 5981 - RNA, 19 nt, Artificial Sequence
  Synthetic
gugccguuaauuaaggaaa

SEQ ID NO: 5982 - RNA, 19 nt, Artificial Sequence
  Synthetic
aacaagugccguuaauuaa

SEQ ID NO: 5983 - RNA, 19 nt, Artificial Sequence
  Synthetic
cugaguuccuacuugcaaa

SEQ ID NO: 5984 - RNA, 19 nt, Artificial Sequence
  Synthetic
gaucaacugaaaucggcaa

SEQ ID NO: 5985 - RNA, 19 nt, Artificial Sequence
  Synthetic
cccucgucguggacagaua

SEQ ID NO: 5986 - RNA, 19 nt, Artificial Sequence
  Synthetic
ugaucacuguaaaugguaa

SEQ ID NO: 5987 - RNA, 19 nt, Artificial Sequence
  Synthetic
gccaugagcgcuaugagaa

SEQ ID NO: 5988 - RNA, 19 nt, Artificial Sequence
  Synthetic
uguaaaugguaaucaguug

SEQ ID NO: 5989 - RNA, 19 nt, Artificial Sequence
  Synthetic
ggccaugagcgcuaugaga

SEQ ID NO: 5990 - RNA, 19 nt, Artificial Sequence
  Synthetic
gguccuguuccuccaguua

SEQ ID NO: 5991 - RNA, 19 nt, Artificial Sequence
  Synthetic
ucauugugaucacuguaaa

SEQ ID NO: 5992 - RNA, 19 nt, Artificial Sequence
  Synthetic
uccaccagcucaugaaaga

SEQ ID NO: 5993 - RNA, 19 nt, Artificial Sequence
  Synthetic
caacugaaaucggcaaacu

SEQ ID NO: 5994 - RNA, 19 nt, Artificial Sequence
  Synthetic
ggacagauacgcauuuucu

SEQ ID NO: 5995 - RNA, 19 nt, Artificial Sequence
  Synthetic
cugagcaguuucauuguga

SEQ ID NO: 5996 - RNA, 19 nt, Artificial Sequence
  Synthetic
ggaacaagugccguuaauu

SEQ ID NO: 5997 - RNA, 19 nt, Artificial Sequence
  Synthetic
gcaaaucgcugggaacaag

SEQ ID NO: 5998 - RNA, 19 nt, Artificial Sequence
  Synthetic
acacgacuuugaacuggaa

SEQ ID NO: 5999 - RNA, 19 nt, Artificial Sequence
  Synthetic
gcaguuucauugugaucac

SEQ ID NO: 6000 - RNA, 19 nt, Artificial Sequence
  Synthetic
gugaucacuguaaauggua

SEQ ID NO: 6001 - RNA, 19 nt, Artificial Sequence
  Synthetic
gauggcacucuguuguauu

SEQ ID NO: 6002 - RNA, 19 nt, Artificial Sequence
  Synthetic
ggacgaggccuuugaguuu

SEQ ID NO: 6003 - RNA, 19 nt, Artificial Sequence
  Synthetic
caguuauggugaugacuua

SEQ ID NO: 6004 - RNA, 19 nt, Artificial Sequence
  Synthetic
cgucaagacauuugcugaa

SEQ ID NO: 6005 - RNA, 19 nt, Artificial Sequence
  Synthetic
cgaacagugcgcugagcua

SEQ ID NO: 6006 - RNA, 19 nt, Artificial Sequence
  Synthetic
aagcagaggcgaagcauca

SEQ ID NO: 6007 - RNA, 19 nt, Artificial Sequence
  Synthetic
gcauaacugccuugaucaa

SEQ ID NO: 6008 - RNA, 19 nt, Artificial Sequence
  Synthetic
caucaagaaugcuggagga

SEQ ID NO: 6009 - RNA, 19 nt, Artificial Sequence
  Synthetic
ugagaggagaaaugcaaua

SEQ ID NO: 6010 - RNA, 19 nt, Artificial Sequence
  Synthetic
ccuuugaguuugugaagca

SEQ ID NO: 6011 - RNA, 19 nt, Artificial Sequence
  Synthetic
gaaaggacucaguguguga

SEQ ID NO: 6012 - RNA, 19 nt, Artificial Sequence
  Synthetic
guaccugggcagugcguau

SEQ ID NO: 6013 - RNA, 19 nt, Artificial Sequence
  Synthetic
gagaaaggacucagugugu

SEQ ID NO: 6014 - RNA, 19 nt, Artificial Sequence
  Synthetic
caagaaugcuggaggaagg

SEQ ID NO: 6015 - RNA, 19 nt, Artificial Sequence
  Synthetic
cgagagggcugguccuuau

SEQ ID NO: 6016 - RNA, 19 nt, Artificial Sequence
  Synthetic
ccaugggccuggagcacau

SEQ ID NO: 6017 - RNA, 19 nt, Artificial Sequence
  Synthetic
gaucaacgucucagccaau

SEQ ID NO: 6018 - RNA, 19 nt, Artificial Sequence
  Synthetic
aggacaaccacaaggcaga

SEQ ID NO: 6019 - RNA, 19 nt, Artificial Sequence
  Synthetic
ccgacgacacauauacaua

SEQ ID NO: 6020 - RNA, 19 nt, Artificial Sequence
  Synthetic
aaauaccaguguuggguuu

SEQ ID NO: 6021 - RNA, 19 nt, Artificial Sequence
  Synthetic
guuguauguuugcugauua

SEQ ID NO: 6022 - RNA, 19 nt, Artificial Sequence
  Synthetic
aggaggauacgaagcguuu

SEQ ID NO: 6023 - RNA, 19 nt, Artificial Sequence
  Synthetic
gcaucccuguggaggacaa

SEQ ID NO: 6024 - RNA, 19 nt, Artificial Sequence
  Synthetic
ucauagacuccaucaagaa

SEQ ID NO: 6025 - RNA, 19 nt, Artificial Sequence
  Synthetic
ggucacuaccaguacaaga

SEQ ID NO: 6026 - RNA, 19 nt, Artificial Sequence
  Synthetic
gagaggagaaaugcaauaa

SEQ ID NO: 6027 - RNA, 19 nt, Artificial Sequence
  Synthetic
caucaaguccaucugacaa

SEQ ID NO: 6028 - RNA, 19 nt, Artificial Sequence
  Synthetic
gaggagaaaugcaauaacu

SEQ ID NO: 6029 - RNA, 19 nt, Artificial Sequence
  Synthetic
gaggaaggguguuugucca

SEQ ID NO: 6030 - RNA, 19 nt, Artificial Sequence
  Synthetic
gacuuagcgucaagacauu

SEQ ID NO: 6031 - RNA, 19 nt, Artificial Sequence
  Synthetic
ggagaaaugcaauaacucu

SEQ ID NO: 6032 - RNA, 19 nt, Artificial Sequence
  Synthetic
ccauaaaccuuguuacaua

SEQ ID NO: 6033 - RNA, 19 nt, Artificial Sequence
  Synthetic
gcugaaugauagacaaaua

SEQ ID NO: 6034 - RNA, 19 nt, Artificial Sequence
  Synthetic
gccagaugguggaggaaua

SEQ ID NO: 6035 - RNA, 19 nt, Artificial Sequence
  Synthetic
gcaaagaagaugaccaaau

SEQ ID NO: 6036 - RNA, 19 nt, Artificial Sequence
  Synthetic
ggucaacaauaaugagaau

SEQ ID NO: 6037 - RNA, 19 nt, Artificial Sequence
  Synthetic
gcuuggagauagaaaggaa

SEQ ID NO: 6038 - RNA, 19 nt, Artificial Sequence
  Synthetic
gagcagguguucaugauaa

SEQ ID NO: 6039 - RNA, 19 nt, Artificial Sequence
  Synthetic
gcaaagaaccucugguguu

SEQ ID NO: 6040 - RNA, 19 nt, Artificial Sequence
  Synthetic
ccacaaacugacaaauuaa

SEQ ID NO: 6041 - RNA, 19 nt, Artificial Sequence
  Synthetic
ucaaugaagccgagugaau

SEQ ID NO: 6042 - RNA, 19 nt, Artificial Sequence
  Synthetic
guaaguuugugaauggaaa

SEQ ID NO: 6043 - RNA, 19 nt, Artificial Sequence
  Synthetic
ugcuagaguucgaggaaga

SEQ ID NO: 6044 - RNA, 19 nt, Artificial Sequence
  Synthetic
acaauggucuggauggaaa

SEQ ID NO: 6045 - RNA, 19 nt, Artificial Sequence
  Synthetic
agaaaggccuguucaacua

SEQ ID NO: 6046 - RNA, 19 nt, Artificial Sequence
  Synthetic
gaagagagaaggcaaagaa

SEQ ID NO: 6047 - RNA, 19 nt, Artificial Sequence
  Synthetic
gaggauggauucugguuuu

SEQ ID NO: 6048 - RNA, 19 nt, Artificial Sequence
  Synthetic
gaggauagccaaugaucau

SEQ ID NO: 6049 - RNA, 19 nt, Artificial Sequence
  Synthetic
ccaaaugcagcaagaguca

SEQ ID NO: 6050 - RNA, 19 nt, Artificial Sequence
  Synthetic
gcucacuggugcaaagaga

SEQ ID NO: 6051 - RNA, 19 nt, Artificial Sequence
  Synthetic
cgaagauacuacacacuuu

SEQ ID NO: 6052 - RNA, 19 nt, Artificial Sequence
  Synthetic
cccacaaacugacaaauua

SEQ ID NO: 6053 - RNA, 19 nt, Artificial Sequence
  Synthetic
gaucaaugaagccgaguga

SEQ ID NO: 6054 - RNA, 19 nt, Artificial Sequence
  Synthetic
uaagaauccuucaggcauu

SEQ ID NO: 6055 - RNA, 19 nt, Artificial Sequence
  Synthetic
ggaagaugcucugguggua

SEQ ID NO: 6056 - RNA, 19 nt, Artificial Sequence
  Synthetic
ccuaaacaacggugugaca

SEQ ID NO: 6057 - RNA, 19 nt, Artificial Sequence
  Synthetic
ugaggaaggaggauggauu

SEQ ID NO: 6058 - RNA, 19 nt, Artificial Sequence
  Synthetic
caccaaagcugaugggcgu

SEQ ID NO: 6059 - RNA, 19 nt, Artificial Sequence
  Synthetic
ccaaggagcuguccacauu

SEQ ID NO: 6060 - RNA, 19 nt, Artificial Sequence
  Synthetic
ugacaaauuaaggagguua

SEQ ID NO: 6061 - RNA, 19 nt, Artificial Sequence
  Synthetic
gaaacaacacggaucaaga

SEQ ID NO: 6062 - RNA, 19 nt, Artificial Sequence
  Synthetic
cgggaaagaccgaaaggaa

SEQ ID NO: 6063 - RNA, 19 nt, Artificial Sequence
  Synthetic
ggaaagaccgaaaggaaga

SEQ ID NO: 6064 - RNA, 19 nt, Artificial Sequence
  Synthetic
gaaaucagcuagacgcuau

SEQ ID NO: 6065 - RNA, 19 nt, Artificial Sequence
  Synthetic
auacagaacauucaggauu

SEQ ID NO: 6066 - RNA, 19 nt, Artificial Sequence
  Synthetic
gguuggaaacuuagcacuu

SEQ ID NO: 6067 - RNA, 19 nt, Artificial Sequence
  Synthetic
cuguggagaucuugcccua

SEQ ID NO: 6068 - RNA, 19 nt, Artificial Sequence
  Synthetic
ggaagugauggguguguca

SEQ ID NO: 6069 - RNA, 19 nt, Artificial Sequence
  Synthetic
gaggaggcuucgacggcuu

SEQ ID NO: 6070 - RNA, 19 nt, Artificial Sequence
  Synthetic
ucauugacugggugaagaa

SEQ ID NO: 6071 - RNA, 19 nt, Artificial Sequence
  Synthetic
gaacaagcugugacaacca

SEQ ID NO: 6072 - RNA, 19 nt, Artificial Sequence
  Synthetic
uacagaacauucaggauuu

SEQ ID NO: 6073 - RNA, 19 nt, Artificial Sequence
  Synthetic
ggacgaggccuuugacuuc

SEQ ID NO: 6074 - RNA, 19 nt, Artificial Sequence
  Synthetic
ccaccaucugucuggcaua

SEQ ID NO: 6075 - RNA, 19 nt, Artificial Sequence
  Synthetic
agacccaggugcuguguca

SEQ ID NO: 6076 - RNA, 19 nt, Artificial Sequence
  Synthetic
uuggaaacuuagcacuuua

SEQ ID NO: 6077 - RNA, 19 nt, Artificial Sequence
  Synthetic
cagcugacauuuaacacuu

SEQ ID NO: 6078 - RNA, 19 nt, Artificial Sequence
  Synthetic
caaggaacaagcugugaca

SEQ ID NO: 6079 - RNA, 19 nt, Artificial Sequence
  Synthetic
gugcucagcugacauuuaa

SEQ ID NO: 6080 - RNA, 19 nt, Artificial Sequence
  Synthetic
ggcagggguuggaaacuua

SEQ ID NO: 6081 - RNA, 19 nt, Artificial Sequence
  Synthetic
gcugcuaccuccucagagu

SEQ ID NO: 6082 - RNA, 19 nt, Artificial Sequence
  Synthetic
cauucaggauuugucaaua

SEQ ID NO: 6083 - RNA, 19 nt, Artificial Sequence
  Synthetic
gaacauucaggauuuguca

SEQ ID NO: 6084 - RNA, 19 nt, Artificial Sequence
  Synthetic
cugcaggccuguggcauca

SEQ ID NO: 6085 - RNA, 19 nt, Artificial Sequence
  Synthetic
gccauaggcuucauugacu

SEQ ID NO: 6086 - RNA, 19 nt, Artificial Sequence
  Synthetic
gguccaccaccauguugaa

SEQ ID NO: 6087 - RNA, 19 nt, Artificial Sequence
  Synthetic
ugugcucagcugacauuua

SEQ ID NO: 6088 - RNA, 19 nt, Artificial Sequence
  Synthetic
guuggaaacuuagcacuuu

SEQ ID NO: 6089 - RNA, 19 nt, Artificial Sequence
  Synthetic
ggaaacuuagcacuuuaua

SEQ ID NO: 6090 - RNA, 19 nt, Artificial Sequence
  Synthetic
gcucagcugacauuuaaca

SEQ ID NO: 6091 - RNA, 19 nt, Artificial Sequence
  Synthetic
gagcccaagcccuguguuc

SEQ ID NO: 6092 - RNA, 19 nt, Artificial Sequence
  Synthetic
gggaacagcucaucaauua

SEQ ID NO: 6093 - RNA, 19 nt, Artificial Sequence
  Synthetic
gggaaguggucaacguauu

SEQ ID NO: 6094 - RNA, 19 nt, Artificial Sequence
  Synthetic
uugcguaccucaugaaaua

SEQ ID NO: 6095 - RNA, 19 nt, Artificial Sequence
  Synthetic
acguauucuucgagggcau

SEQ ID NO: 6096 - RNA, 19 nt, Artificial Sequence
  Synthetic
uggaaguggucaacguauu

SEQ ID NO: 6097 - RNA, 19 nt, Artificial Sequence
  Synthetic
ccaaauaaccagaagcuug

SEQ ID NO: 6098 - RNA, 19 nt, Artificial Sequence
  Synthetic
cggauggugccuuguuaaa

SEQ ID NO: 6099 - RNA, 19 nt, Artificial Sequence
  Synthetic
gaacuugaacacugacauu

SEQ ID NO: 6100 - RNA, 19 nt, Artificial Sequence
  Synthetic
ccucgguggaaguggucaa

SEQ ID NO: 6101 - RNA, 19 nt, Artificial Sequence
  Synthetic
ucaacucgccgguagguaa

SEQ ID NO: 6102 - RNA, 19 nt, Artificial Sequence
  Synthetic
gaagcuuguuucucagcaa

SEQ ID NO: 6103 - RNA, 19 nt, Artificial Sequence
  Synthetic
guaacaucccugacaucua

SEQ ID NO: 6104 - RNA, 19 nt, Artificial Sequence
  Synthetic
acgaauucaagcuguuuaa

SEQ ID NO: 6105 - RNA, 19 nt, Artificial Sequence
  Synthetic
agccuuaccuuaauagaau

SEQ ID NO: 6106 - RNA, 19 nt, Artificial Sequence
  Synthetic
gaacuagcuugguaagugu

SEQ ID NO: 6107 - RNA, 19 nt, Artificial Sequence
  Synthetic
cggcugcuauccugaacua

SEQ ID NO: 6108 - RNA, 19 nt, Artificial Sequence
  Synthetic
caaauaaccagaagcuugu

SEQ ID NO: 6109 - RNA, 19 nt, Artificial Sequence
  Synthetic
acaccuagccugagacuug

SEQ ID NO: 6110 - RNA, 19 nt, Artificial Sequence
  Synthetic
acauaaaggugccuguuac

SEQ ID NO: 6111 - RNA, 19 nt, Artificial Sequence
  Synthetic
gccgauagcugguccucuu

SEQ ID NO: 6112 - RNA, 19 nt, Artificial Sequence
  Synthetic
ggugggaaguggucaacgu

SEQ ID NO: 6113 - RNA, 19 nt, Artificial Sequence
  Synthetic
acacugacauuuuguuagu

SEQ ID NO: 6114 - RNA, 19 nt, Artificial Sequence
  Synthetic
ucccugacaucuaugagaa

SEQ ID NO: 6115 - RNA, 19 nt, Artificial Sequence
  Synthetic
cuacagcuucucccaaaua

SEQ ID NO: 6116 - RNA, 19 nt, Artificial Sequence
  Synthetic
gagggcauucaguacauaa

SEQ ID NO: 6117 - RNA, 19 nt, Artificial Sequence
  Synthetic
gguggaaguggucaacgua

SEQ ID NO: 6118 - RNA, 19 nt, Artificial Sequence
  Synthetic
gacugaacuugaacacuga

SEQ ID NO: 6119 - RNA, 19 nt, Artificial Sequence
  Synthetic
ggaccagccgccuugauga

SEQ ID NO: 6120 - RNA, 19 nt, Artificial Sequence
  Synthetic
ugggaacagcucaucaauu

SEQ ID NO: 6121 - RNA, 19 nt, Artificial Sequence
  Synthetic
uacauaaaggugccuguua

SEQ ID NO: 6122 - RNA, 19 nt, Artificial Sequence
  Synthetic
ggaagaaagggaagaauua

SEQ ID NO: 6123 - RNA, 19 nt, Artificial Sequence
  Synthetic
gcaauaaggacuccgaaua

SEQ ID NO: 6124 - RNA, 19 nt, Artificial Sequence
  Synthetic
acuccaacuuagagcaaua

SEQ ID NO: 6125 - RNA, 19 nt, Artificial Sequence
  Synthetic
gccaaggacuggaagcaua

SEQ ID NO: 6126 - RNA, 19 nt, Artificial Sequence
  Synthetic
aggaagaaagggaagaauu

SEQ ID NO: 6127 - RNA, 19 nt, Artificial Sequence
  Synthetic
ggaggaagggagcuggaaa

SEQ ID NO: 6128 - RNA, 19 nt, Artificial Sequence
  Synthetic
ccaaagcgcuccaagagaa

SEQ ID NO: 6129 - RNA, 19 nt, Artificial Sequence
  Synthetic
caguaaggcuugaagugau

SEQ ID NO: 6130 - RNA, 19 nt, Artificial Sequence
  Synthetic
agauguagguguaaauuga

SEQ ID NO: 6131 - RNA, 19 nt, Artificial Sequence
  Synthetic
ccaaggacuggaagcauaa

SEQ ID NO: 6132 - RNA, 19 nt, Artificial Sequence
  Synthetic
ggaggcaguuccuggcuaa

SEQ ID NO: 6133 - RNA, 19 nt, Artificial Sequence
  Synthetic
aaagacagauguaggugua

SEQ ID NO: 6134 - RNA, 19 nt, Artificial Sequence
  Synthetic
ccacagagcccuuggaccu

SEQ ID NO: 6135 - RNA, 19 nt, Artificial Sequence
  Synthetic
ugucguuguuguaguuaaa

SEQ ID NO: 6136 - RNA, 19 nt, Artificial Sequence
  Synthetic
ggaagaauuagguuugaau

SEQ ID NO: 6137 - RNA, 19 nt, Artificial Sequence
  Synthetic
agacagauguagguguaaa

SEQ ID NO: 6138 - RNA, 19 nt, Artificial Sequence
  Synthetic
ggaggaagaaagggaagaa

SEQ ID NO: 6139 - RNA, 19 nt, Artificial Sequence
  Synthetic
gagugaaauuugacccuuu

SEQ ID NO: 6140 - RNA, 19 nt, Artificial Sequence
  Synthetic
guaacuaaagacagaugua

SEQ ID NO: 6141 - RNA, 19 nt, Artificial Sequence
  Synthetic
aagcaaacucacuauguua

SEQ ID NO: 6142 - RNA, 19 nt, Artificial Sequence
  Synthetic
uggccuaccugaugaugaa

SEQ ID NO: 6143 - RNA, 19 nt, Artificial Sequence
  Synthetic
cgacgaggccagccagaau

SEQ ID NO: 6144 - RNA, 19 nt, Artificial Sequence
  Synthetic
gggcaaagggaugagaaga

SEQ ID NO: 6145 - RNA, 19 nt, Artificial Sequence
  Synthetic
gguaguuucugcuuacaaa

SEQ ID NO: 6146 - RNA, 19 nt, Artificial Sequence
  Synthetic
gcaucccaguggaagauaa

SEQ ID NO: 6147 - RNA, 19 nt, Artificial Sequence
  Synthetic
ggaaguaaauggugucuug

SEQ ID NO: 6148 - RNA, 19 nt, Artificial Sequence
  Synthetic
gaagaaaaguucacuccaa

SEQ ID NO: 6149 - RNA, 19 nt, Artificial Sequence
  Synthetic
gcaaagggaugagaagaca

SEQ ID NO: 6150 - RNA, 19 nt, Artificial Sequence
  Synthetic
gggaagaauuagguuugaa

SEQ ID NO: 6151 - RNA, 19 nt, Artificial Sequence
  Synthetic
caagagaaagugccaggaa

SEQ ID NO: 6152 - RNA, 19 nt, Artificial Sequence
  Synthetic
aagagaagauugagaguga

SEQ ID NO: 6153 - RNA, 19 nt, Artificial Sequence
  Synthetic
gaagaaaagcaguauguua

SEQ ID NO: 6154 - RNA, 19 nt, Artificial Sequence
  Synthetic
gaagauugagagugagaga

SEQ ID NO: 6155 - RNA, 19 nt, Artificial Sequence
  Synthetic
gagaagauugagagugaga

SEQ ID NO: 6156 - RNA, 19 nt, Artificial Sequence
  Synthetic
guagauuccaggaggagaa

SEQ ID NO: 6157 - RNA, 19 nt, Artificial Sequence
  Synthetic
gagaaaaggcaguuaugaa

SEQ ID NO: 6158 - RNA, 19 nt, Artificial Sequence
  Synthetic
cagcaacgugggagaaaga

SEQ ID NO: 6159 - RNA, 19 nt, Artificial Sequence
  Synthetic
guagcaagauguuggcuuu

SEQ ID NO: 6160 - RNA, 19 nt, Artificial Sequence
  Synthetic
gaaggaaggccaagccauu

SEQ ID NO: 6161 - RNA, 19 nt, Artificial Sequence
  Synthetic
ccacuuucaagaagcaaua

SEQ ID NO: 6162 - RNA, 19 nt, Artificial Sequence
  Synthetic
cggaauauccugaguguug

SEQ ID NO: 6163 - RNA, 19 nt, Artificial Sequence
  Synthetic
cccaagagcaacugugauu

SEQ ID NO: 6164 - RNA, 19 nt, Artificial Sequence
  Synthetic
ucacaagagaagauugaga

SEQ ID NO: 6165 - RNA, 19 nt, Artificial Sequence
  Synthetic
agacuuucuacucggaaua

SEQ ID NO: 6166 - RNA, 19 nt, Artificial Sequence
  Synthetic
cagcagaagcccuguggca

SEQ ID NO: 6167 - RNA, 19 nt, Artificial Sequence
  Synthetic
gaggcaagguccuggucca

SEQ ID NO: 6168 - RNA, 19 nt, Artificial Sequence
  Synthetic
ggagcauggucucgcccaa

SEQ ID NO: 6169 - RNA, 19 nt, Artificial Sequence
  Synthetic
caaauggaucccuguggaa

SEQ ID NO: 6170 - RNA, 19 nt, Artificial Sequence
  Synthetic
aguguugcguggauguaaa

SEQ ID NO: 6171 - RNA, 19 nt, Artificial Sequence
  Synthetic
caauaaauaccugcagcaa

SEQ ID NO: 6172 - RNA, 19 nt, Artificial Sequence
  Synthetic
gagacuuucuacucggaau

SEQ ID NO: 6173 - RNA, 19 nt, Artificial Sequence
  Synthetic
ccauuucacaagagaagau

SEQ ID NO: 6174 - RNA, 19 nt, Artificial Sequence
  Synthetic
gaaggguacuugcuaggua

SEQ ID NO: 6175 - RNA, 19 nt, Artificial Sequence
  Synthetic
aaacugggauggaggaauc

SEQ ID NO: 6176 - RNA, 19 nt, Artificial Sequence
  Synthetic
acuguggacuucugggauu

SEQ ID NO: 6177 - RNA, 19 nt, Artificial Sequence
  Synthetic
caagagcaacugugauuuu

SEQ ID NO: 6178 - RNA, 19 nt, Artificial Sequence
  Synthetic
gcagaagcccuguggcaac

SEQ ID NO: 6179 - RNA, 19 nt, Artificial Sequence
  Synthetic
ucaccaggcuugcaaauga

SEQ ID NO: 6180 - RNA, 19 nt, Artificial Sequence
  Synthetic
gcaacgugguacuacuuuu

SEQ ID NO: 6181 - RNA, 19 nt, Artificial Sequence
  Synthetic
ccugaaauguuguguagac

SEQ ID NO: 6182 - RNA, 19 nt, Artificial Sequence
  Synthetic
cggaauugguuaauacuaa

SEQ ID NO: 6183 - RNA, 19 nt, Artificial Sequence
  Synthetic
aggacaugcuguauagaua

SEQ ID NO: 6184 - RNA, 19 nt, Artificial Sequence
  Synthetic
cggaaauggcgaucagcaa

SEQ ID NO: 6185 - RNA, 19 nt, Artificial Sequence
  Synthetic
ucaagaagcucaaggacga

SEQ ID NO: 6186 - RNA, 19 nt, Artificial Sequence
  Synthetic
gggaaggcgaggcggaauu

SEQ ID NO: 6187 - RNA, 19 nt, Artificial Sequence
  Synthetic
caggagaguuuaaauacaa

SEQ ID NO: 6188 - RNA, 19 nt, Artificial Sequence
  Synthetic
acgcaggagaguuuaaaua

SEQ ID NO: 6189 - RNA, 19 nt, Artificial Sequence
  Synthetic
ugagaacgcaggagaguuu

SEQ ID NO: 6190 - RNA, 19 nt, Artificial Sequence
  Synthetic
uagaggagccaaagagaga

SEQ ID NO: 6191 - RNA, 19 nt, Artificial Sequence
  Synthetic
agagauucauugacacuaa

SEQ ID NO: 6192 - RNA, 19 nt, Artificial Sequence
  Synthetic
gcagcuucauugagagaga

SEQ ID NO: 6193 - RNA, 19 nt, Artificial Sequence
  Synthetic
gaacgaugccuaugacauu

SEQ ID NO: 6194 - RNA, 19 nt, Artificial Sequence
  Synthetic
cguucuaccuggaagauga

SEQ ID NO: 6195 - RNA, 19 nt, Artificial Sequence
  Synthetic
ucggaucacuggagccaaa

SEQ ID NO: 6196 - RNA, 19 nt, Artificial Sequence
  Synthetic
gggaaagacaccaaaucau

SEQ ID NO: 6197 - RNA, 19 nt, Artificial Sequence
  Synthetic
agauacaggcaguagguuu

SEQ ID NO: 6198 - RNA, 19 nt, Artificial Sequence
  Synthetic
uggcuuaccuuaugcagaa

SEQ ID NO: 6199 - RNA, 19 nt, Artificial Sequence
  Synthetic
gcaggagaguuuaaauaca

SEQ ID NO: 6200 - RNA, 19 nt, Artificial Sequence
  Synthetic
ugacaguguuuguuugaau

SEQ ID NO: 6201 - RNA, 19 nt, Artificial Sequence
  Synthetic
ccgacacaguggugcucua

SEQ ID NO: 6202 - RNA, 19 nt, Artificial Sequence
  Synthetic
gguaggagcauguguucuu

SEQ ID NO: 6203 - RNA, 19 nt, Artificial Sequence
  Synthetic
acuucaacuucauggguca

SEQ ID NO: 6204 - RNA, 19 nt, Artificial Sequence
  Synthetic
gaggagccaaagagagauu

SEQ ID NO: 6205 - RNA, 19 nt, Artificial Sequence
  Synthetic
ugagagagauucauugaca

SEQ ID NO: 6206 - RNA, 19 nt, Artificial Sequence
  Synthetic
aaagggagaaagagcagua

SEQ ID NO: 6207 - RNA, 19 nt, Artificial Sequence
  Synthetic
cuuccaaccagaauguaua

SEQ ID NO: 6208 - RNA, 19 nt, Artificial Sequence
  Synthetic
gauuagaagccgcuagacu

SEQ ID NO: 6209 - RNA, 19 nt, Artificial Sequence
  Synthetic
agagagaaccuccggcuuu

SEQ ID NO: 6210 - RNA, 19 nt, Artificial Sequence
  Synthetic
gaaauggcgaucagcaaga

SEQ ID NO: 6211 - RNA, 19 nt, Artificial Sequence
  Synthetic
ggaacugacuauauaauug

SEQ ID NO: 6212 - RNA, 19 nt, Artificial Sequence
  Synthetic
acgacuuugucaagaggaa

SEQ ID NO: 6213 - RNA, 19 nt, Artificial Sequence
  Synthetic
aaguauggcaucaaguaua

SEQ ID NO: 6214 - RNA, 19 nt, Artificial Sequence
  Synthetic
cuaagcagcccgugcgaca

SEQ ID NO: 6215 - RNA, 19 nt, Artificial Sequence
  Synthetic
gcaaguauggcaucaagua

SEQ ID NO: 6216 - RNA, 19 nt, Artificial Sequence
  Synthetic
cagcagugccaccgaguca

SEQ ID NO: 6217 - RNA, 19 nt, Artificial Sequence
  Synthetic
gcgccaaggacuccaccaa

SEQ ID NO: 6218 - RNA, 19 nt, Artificial Sequence
  Synthetic
gcaucaaguauauccucaa

SEQ ID NO: 6219 - RNA, 19 nt, Artificial Sequence
  Synthetic
cgacuuugucaagaggaaa

SEQ ID NO: 6220 - RNA, 19 nt, Artificial Sequence
  Synthetic
aguauggcaucaaguauau

SEQ ID NO: 6221 - RNA, 19 nt, Artificial Sequence
  Synthetic
agaugaaccugucacucaa

SEQ ID NO: 6222 - RNA, 19 nt, Artificial Sequence
  Synthetic
gguuucaacaaguuucaaa

SEQ ID NO: 6223 - RNA, 19 nt, Artificial Sequence
  Synthetic
ggacgugcucggcaaguau

SEQ ID NO: 6224 - RNA, 19 nt, Artificial Sequence
  Synthetic
caaguauggcaucaaguau

SEQ ID NO: 6225 - RNA, 19 nt, Artificial Sequence
  Synthetic
aaguauauccucaauguca

SEQ ID NO: 6226 - RNA, 19 nt, Artificial Sequence
  Synthetic
aagaugaaccugucacuca

SEQ ID NO: 6227 - RNA, 19 nt, Artificial Sequence
  Synthetic
caucagcuucauugacgaa

SEQ ID NO: 6228 - RNA, 19 nt, Artificial Sequence
  Synthetic
ccuccaaggugguuucaac

SEQ ID NO: 6229 - RNA, 19 nt, Artificial Sequence
  Synthetic
gcggcgaguucaccuacaa

SEQ ID NO: 6230 - RNA, 19 nt, Artificial Sequence
  Synthetic
caacgacgccuacgacuuu

SEQ ID NO: 6231 - RNA, 19 nt, Artificial Sequence
  Synthetic
caucaaguauauccucaau

SEQ ID NO: 6232 - RNA, 19 nt, Artificial Sequence
  Synthetic
ucaacgacgccuacgacuu

SEQ ID NO: 6233 - RNA, 19 nt, Artificial Sequence
  Synthetic
ucaaguauauccucaaugu

SEQ ID NO: 6234 - RNA, 19 nt, Artificial Sequence
  Synthetic
caaggugguuucaacaagu

SEQ ID NO: 6235 - RNA, 19 nt, Artificial Sequence
  Synthetic
ggcaucagccgcucaguga

SEQ ID NO: 6236 - RNA, 19 nt, Artificial Sequence
  Synthetic
uggacgugcucggcaagua

SEQ ID NO: 6237 - RNA, 19 nt, Artificial Sequence
  Synthetic
ccaccaaccacaaccuguu

SEQ ID NO: 6238 - RNA, 19 nt, Artificial Sequence
  Synthetic
ccaccgugcugcucuacga

SEQ ID NO: 6239 - RNA, 19 nt, Artificial Sequence
  Synthetic
gcagaagaugaaccuguca

SEQ ID NO: 6240 - RNA, 19 nt, Artificial Sequence
  Synthetic
ccaaggugguuucaacaag

SEQ ID NO: 6241 - RNA, 19 nt, Artificial Sequence
  Synthetic
gccagaaccucucccaguu

SEQ ID NO: 6242 - RNA, 19 nt, Artificial Sequence
  Synthetic
ggaaggugauggaugccaa

SEQ ID NO: 6243 - RNA, 19 nt, Artificial Sequence
  Synthetic
ccuacagguucgugaagga

SEQ ID NO: 6244 - RNA, 19 nt, Artificial Sequence
  Synthetic
gggugguccucgagcucua

SEQ ID NO: 6245 - RNA, 19 nt, Artificial Sequence
  Synthetic
cagccaggcccguuauaaa

SEQ ID NO: 6246 - RNA, 19 nt, Artificial Sequence
  Synthetic
cacaggacgugguggucua

SEQ ID NO: 6247 - RNA, 19 nt, Artificial Sequence
  Synthetic
aggaaacacugcugaccuu

SEQ ID NO: 6248 - RNA, 19 nt, Artificial Sequence
  Synthetic
aacgacaacuacugugaaa

SEQ ID NO: 6249 - RNA, 19 nt, Artificial Sequence
  Synthetic
gagcgcugccacagggaau

SEQ ID NO: 6250 - RNA, 19 nt, Artificial Sequence
  Synthetic
gaauaagcuacguccucaa

SEQ ID NO: 6251 - RNA, 19 nt, Artificial Sequence
  Synthetic
cauacguuucuaagcaaua

SEQ ID NO: 6252 - RNA, 19 nt, Artificial Sequence
  Synthetic
caaagaaagguaaaugguu

SEQ ID NO: 6253 - RNA, 19 nt, Artificial Sequence
  Synthetic
uggaguucgaggagggcau

SEQ ID NO: 6254 - RNA, 19 nt, Artificial Sequence
  Synthetic
ugcaaaggcugccgagcuu

SEQ ID NO: 6255 - RNA, 19 nt, Artificial Sequence
  Synthetic
gcaaagaaagguaaauggu

SEQ ID NO: 6256 - RNA, 19 nt, Artificial Sequence
  Synthetic
gcaaugauuuggcaacagu

SEQ ID NO: 6257 - RNA, 19 nt, Artificial Sequence
  Synthetic
cuaaacaaggaucugauga

SEQ ID NO: 6258 - RNA, 19 nt, Artificial Sequence
  Synthetic
aggacgugguggucuauga

SEQ ID NO: 6259 - RNA, 19 nt, Artificial Sequence
  Synthetic
ggugauggaugccaagaag

SEQ ID NO: 6260 - RNA, 19 nt, Artificial Sequence
  Synthetic
acaaguccaucgaguucau

SEQ ID NO: 6261 - RNA, 19 nt, Artificial Sequence
  Synthetic
gcagcugccagauggaguu

SEQ ID NO: 6262 - RNA, 19 nt, Artificial Sequence
  Synthetic
gcugccagauggaguucga

SEQ ID NO: 6263 - RNA, 19 nt, Artificial Sequence
  Synthetic
aacauacguuucuaagcaa

SEQ ID NO: 6264 - RNA, 19 nt, Artificial Sequence
  Synthetic
ucaacgacaacuacuguga

SEQ ID NO: 6265 - RNA, 19 nt, Artificial Sequence
  Synthetic
ugucugguauuuaaacuga

SEQ ID NO: 6266 - RNA, 19 nt, Artificial Sequence
  Synthetic
uaaacaaggaucugaugac

SEQ ID NO: 6267 - RNA, 19 nt, Artificial Sequence
  Synthetic
caacgacaacuacugugaa

SEQ ID NO: 6268 - RNA, 19 nt, Artificial Sequence
  Synthetic
gccgagcuuucgugcacuu

SEQ ID NO: 6269 - RNA, 19 nt, Artificial Sequence
  Synthetic
gcagccaggcccguuauaa

SEQ ID NO: 6270 - RNA, 19 nt, Artificial Sequence
  Synthetic
gugcucagcuccgucaaca

SEQ ID NO: 6271 - RNA, 19 nt, Artificial Sequence
  Synthetic
ggaaacacugcugaccuuu

SEQ ID NO: 6272 - RNA, 19 nt, Artificial Sequence
  Synthetic
guggauuaccugagggaaa

SEQ ID NO: 6273 - RNA, 19 nt, Artificial Sequence
  Synthetic
cgacagaaccugcgcgaga

SEQ ID NO: 6274 - RNA, 19 nt, Artificial Sequence
  Synthetic
aggagaauggagagcgaaa

SEQ ID NO: 6275 - RNA, 19 nt, Artificial Sequence
  Synthetic
cgucauugucccugagaau

SEQ ID NO: 6276 - RNA, 19 nt, Artificial Sequence
  Synthetic
uagaugugguggagggaau

SEQ ID NO: 6277 - RNA, 19 nt, Artificial Sequence
  Synthetic
caggaggaaaugaaggaua

SEQ ID NO: 6278 - RNA, 19 nt, Artificial Sequence
  Synthetic
caccuaaggaagagaagua

SEQ ID NO: 6279 - RNA, 19 nt, Artificial Sequence
  Synthetic
accgaaagcaggaggaaau

SEQ ID NO: 6280 - RNA, 19 nt, Artificial Sequence
  Synthetic
gggaugagcaagagcuuca

SEQ ID NO: 6281 - RNA, 19 nt, Artificial Sequence
  Synthetic
caucagggcaacugggaga

SEQ ID NO: 6282 - RNA, 19 nt, Artificial Sequence
  Synthetic
ccaggagaauggagagcga

SEQ ID NO: 6283 - RNA, 19 nt, Artificial Sequence
  Synthetic
gggaaagcuucgucggaac

SEQ ID NO: 6284 - RNA, 19 nt, Artificial Sequence
  Synthetic
ugaucagcucaguggauua

SEQ ID NO: 6285 - RNA, 19 nt, Artificial Sequence
  Synthetic
ccaguaggcaccagagaga

SEQ ID NO: 6286 - RNA, 19 nt, Artificial Sequence
  Synthetic
cugagagggaugagcaaga

SEQ ID NO: 6287 - RNA, 19 nt, Artificial Sequence
  Synthetic
ucaggaaauccgaaaguau

SEQ ID NO: 6288 - RNA, 19 nt, Artificial Sequence
  Synthetic
gcagccaaacagaggacua

SEQ ID NO: 6289 - RNA, 19 nt, Artificial Sequence
  Synthetic
caguggauguucuggguga

SEQ ID NO: 6290 - RNA, 19 nt, Artificial Sequence
  Synthetic
ccaagagaacaaugaggau

SEQ ID NO: 6291 - RNA, 19 nt, Artificial Sequence
  Synthetic
gccaguauggugugguaua

SEQ ID NO: 6292 - RNA, 19 nt, Artificial Sequence
  Synthetic
uuaaucaggcaguggcuaa

SEQ ID NO: 6293 - RNA, 19 nt, Artificial Sequence
  Synthetic
agagaaaacggaagaucua

SEQ ID NO: 6294 - RNA, 19 nt, Artificial Sequence
  Synthetic
cucccaaacgucuggaaua

SEQ ID NO: 6295 - RNA, 19 nt, Artificial Sequence
  Synthetic
gaucuauggcugaggguuc

SEQ ID NO: 6296 - RNA, 19 nt, Artificial Sequence
  Synthetic
ugccgaagcaugagcgauu

SEQ ID NO: 6297 - RNA, 19 nt, Artificial Sequence
  Synthetic
ggaagaggaagguggccca

SEQ ID NO: 6298 - RNA, 19 nt, Artificial Sequence
  Synthetic
ugaauauugccaaccgaaa

SEQ ID NO: 6299 - RNA, 19 nt, Artificial Sequence
  Synthetic
cugagacacuugagcacau

SEQ ID NO: 6300 - RNA, 19 nt, Artificial Sequence
  Synthetic
ugggugacuuggugaauga

SEQ ID NO: 6301 - RNA, 19 nt, Artificial Sequence
  Synthetic
gauggaagccuguugggau

SEQ ID NO: 6302 - RNA, 19 nt, Artificial Sequence
  Synthetic
ugaaagaagacgaugcaua

SEQ ID NO: 6303 - RNA, 19 nt, Artificial Sequence
  Synthetic
gaguaugagugcaagcaaa

SEQ ID NO: 6304 - RNA, 19 nt, Artificial Sequence
  Synthetic
caucuugaguauagcaaua

SEQ ID NO: 6305 - RNA, 19 nt, Artificial Sequence
  Synthetic
ggcaauaaguauagacuca

SEQ ID NO: 6306 - RNA, 19 nt, Artificial Sequence
  Synthetic
ggagaaugaagauaaguaa

SEQ ID NO: 6307 - RNA, 19 nt, Artificial Sequence
  Synthetic
agguagaucagaugaauaa

SEQ ID NO: 6308 - RNA, 19 nt, Artificial Sequence
  Synthetic
gaaccuaacacgaaaguuu

SEQ ID NO: 6309 - RNA, 19 nt, Artificial Sequence
  Synthetic
gguggaauauucagguuua

SEQ ID NO: 6310 - RNA, 19 nt, Artificial Sequence
  Synthetic
gccaauacauuuacagcaa

SEQ ID NO: 6311 - RNA, 19 nt, Artificial Sequence
  Synthetic
gggagaaugaagauaagua

SEQ ID NO: 6312 - RNA, 19 nt, Artificial Sequence
  Synthetic
gcauacaggaggagagacu

SEQ ID NO: 6313 - RNA, 19 nt, Artificial Sequence
  Synthetic
uaacauucuuggaguggaa

SEQ ID NO: 6314 - RNA, 19 nt, Artificial Sequence
  Synthetic
ccguaaacuucauaacauu

SEQ ID NO: 6315 - RNA, 19 nt, Artificial Sequence
  Synthetic
cagaggugcuacugggaau

SEQ ID NO: 6316 - RNA, 19 nt, Artificial Sequence
  Synthetic
gaaaagaagcaguaaucua

SEQ ID NO: 6317 - RNA, 19 nt, Artificial Sequence
  Synthetic
cuacauagugcauuugaaa

SEQ ID NO: 6318 - RNA, 19 nt, Artificial Sequence
  Synthetic
gacaggaguuugugugcaa

SEQ ID NO: 6319 - RNA, 19 nt, Artificial Sequence
  Synthetic
uuacaugacugaaggacau

SEQ ID NO: 6320 - RNA, 19 nt, Artificial Sequence
  Synthetic
gcucgugacuacauugaaa

SEQ ID NO: 6321 - RNA, 19 nt, Artificial Sequence
  Synthetic
gaauggaaacuuggaaaua

SEQ ID NO: 6322 - RNA, 19 nt, Artificial Sequence
  Synthetic
aaagaaaggcuaaacacua

SEQ ID NO: 6323 - RNA, 19 nt, Artificial Sequence
  Synthetic
gaacuauacugaggcaaua

SEQ ID NO: 6324 - RNA, 19 nt, Artificial Sequence
  Synthetic
gggaaugccuuaugaccuu

SEQ ID NO: 6325 - RNA, 19 nt, Artificial Sequence
  Synthetic
gcugaugaagguacaaaua

SEQ ID NO: 6326 - RNA, 19 nt, Artificial Sequence
  Synthetic
gagcaaagcagcaauuaca

SEQ ID NO: 6327 - RNA, 19 nt, Artificial Sequence
  Synthetic
gggauaaccuuuggccuua

SEQ ID NO: 6328 - RNA, 19 nt, Artificial Sequence
  Synthetic
gaacauaguagauugacau

SEQ ID NO: 6329 - RNA, 19 nt, Artificial Sequence
  Synthetic
uaguggaaguucuggguau

SEQ ID NO: 6330 - RNA, 19 nt, Artificial Sequence
  Synthetic
cagacaggcugguauuuaa

SEQ ID NO: 6331 - RNA, 19 nt, Artificial Sequence
  Synthetic
gagguagaucagaugaaua

SEQ ID NO: 6332 - RNA, 19 nt, Artificial Sequence
  Synthetic
gcaacaagaaggagaagaa

SEQ ID NO: 6333 - RNA, 19 nt, Artificial Sequence
  Synthetic
ccaucaagauuguggacuu

SEQ ID NO: 6334 - RNA, 19 nt, Artificial Sequence
  Synthetic
agaagaagguccugaacca

SEQ ID NO: 6335 - RNA, 19 nt, Artificial Sequence
  Synthetic
ggacgaaagaacucaggaa

SEQ ID NO: 6336 - RNA, 19 nt, Artificial Sequence
  Synthetic
ggugaaagccuaugaucau

SEQ ID NO: 6337 - RNA, 19 nt, Artificial Sequence
  Synthetic
acacggagaugaaguacua

SEQ ID NO: 6338 - RNA, 19 nt, Artificial Sequence
  Synthetic
ccaucaagaucaucaagaa

SEQ ID NO: 6339 - RNA, 19 nt, Artificial Sequence
  Synthetic
ucaagaucaucaagaacaa

SEQ ID NO: 6340 - RNA, 19 nt, Artificial Sequence
  Synthetic
cgaaagaacucaggaagga

SEQ ID NO: 6341 - RNA, 19 nt, Artificial Sequence
  Synthetic
agguauacuaugcgaagaa

SEQ ID NO: 6342 - RNA, 19 nt, Artificial Sequence
  Synthetic
ccaaugaggucgaccagau

SEQ ID NO: 6343 - RNA, 19 nt, Artificial Sequence
  Synthetic
ggaccuaccgcuacagcaa

SEQ ID NO: 6344 - RNA, 19 nt, Artificial Sequence
  Synthetic
cgagcaacaagaaggagaa

SEQ ID NO: 6345 - RNA, 19 nt, Artificial Sequence
  Synthetic
cagaggaucuaccaguaua

SEQ ID NO: 6346 - RNA, 19 nt, Artificial Sequence
  Synthetic
cuacgaaggacgaaagaac

SEQ ID NO: 6347 - RNA, 19 nt, Artificial Sequence
  Synthetic
uauacuaugcgaagaagaa

SEQ ID NO: 6348 - RNA, 19 nt, Artificial Sequence
  Synthetic
uguacgaccuccugcgcaa

SEQ ID NO: 6349 - RNA, 19 nt, Artificial Sequence
  Synthetic
ccuacaagcacaucaauga

SEQ ID NO: 6350 - RNA, 19 nt, Artificial Sequence
  Synthetic
uggugaaagccuaugauca

SEQ ID NO: 6351 - RNA, 19 nt, Artificial Sequence
  Synthetic
gcugcauccuuguggagau

SEQ ID NO: 6352 - RNA, 19 nt, Artificial Sequence
  Synthetic
cccaggagcuuguggccau

SEQ ID NO: 6353 - RNA, 19 nt, Artificial Sequence
  Synthetic
acaagaaggagaagaaggu

SEQ ID NO: 6354 - RNA, 19 nt, Artificial Sequence
  Synthetic
acggagaugaaguacuaua

SEQ ID NO: 6355 - RNA, 19 nt, Artificial Sequence
  Synthetic
cagcuuggccagaggaucu

SEQ ID NO: 6356 - RNA, 19 nt, Artificial Sequence
  Synthetic
uuguggaggugcugggcau

SEQ ID NO: 6357 - RNA, 19 nt, Artificial Sequence
  Synthetic
ggugaggccugcacugauu

SEQ ID NO: 6358 - RNA, 19 nt, Artificial Sequence
  Synthetic
caucaaugagguauacuau

SEQ ID NO: 6359 - RNA, 19 nt, Artificial Sequence
  Synthetic
ggagaugaaguacuauaua

SEQ ID NO: 6360 - RNA, 19 nt, Artificial Sequence
  Synthetic
aagaacucaggaaggauua

SEQ ID NO: 6361 - RNA, 19 nt, Artificial Sequence
  Synthetic
cggagaugaaguacuauau

SEQ ID NO: 6362 - RNA, 19 nt, Artificial Sequence
  Synthetic
ggauaaaugggaauggaaa

SEQ ID NO: 6363 - RNA, 19 nt, Artificial Sequence
  Synthetic
ggacaaugcuuuaaguuuu

SEQ ID NO: 6364 - RNA, 19 nt, Artificial Sequence
  Synthetic
ggaagcaggacaaggauaa

SEQ ID NO: 6365 - RNA, 19 nt, Artificial Sequence
  Synthetic
ggguagaagcgguauuaaa

SEQ ID NO: 6366 - RNA, 19 nt, Artificial Sequence
  Synthetic
gcugguaaccugaaagaua

SEQ ID NO: 6367 - RNA, 19 nt, Artificial Sequence
  Synthetic
cccuaaagauggugcggaa

SEQ ID NO: 6368 - RNA, 19 nt, Artificial Sequence
  Synthetic
gcacagagauuauuguauu

SEQ ID NO: 6369 - RNA, 19 nt, Artificial Sequence
  Synthetic
ggagaaaacgucagugaaa

SEQ ID NO: 6370 - RNA, 19 nt, Artificial Sequence
  Synthetic
caaagaagauuuagcagau

SEQ ID NO: 6371 - RNA, 19 nt, Artificial Sequence
  Synthetic
uagaagaaccccagagaua

SEQ ID NO: 6372 - RNA, 19 nt, Artificial Sequence
  Synthetic
gcuuauauaugcacagaga

SEQ ID NO: 6373 - RNA, 19 nt, Artificial Sequence
  Synthetic
guaaagaagccucauauua

SEQ ID NO: 6374 - RNA, 19 nt, Artificial Sequence
  Synthetic
ggacagugcucacgacaca

SEQ ID NO: 6375 - RNA, 19 nt, Artificial Sequence
  Synthetic
gguaguacagauuaggaua

SEQ ID NO: 6376 - RNA, 19 nt, Artificial Sequence
  Synthetic
ugauugaacuguugggcau

SEQ ID NO: 6377 - RNA, 19 nt, Artificial Sequence
  Synthetic
gaacaagcaaugaagcaau

SEQ ID NO: 6378 - RNA, 19 nt, Artificial Sequence
  Synthetic
guacagauuaggauaagua

SEQ ID NO: 6379 - RNA, 19 nt, Artificial Sequence
  Synthetic
cuaagaagcgccagggcau

SEQ ID NO: 6380 - RNA, 19 nt, Artificial Sequence
  Synthetic
aaacuguaccuuagagauu

SEQ ID NO: 6381 - RNA, 19 nt, Artificial Sequence
  Synthetic
guaguacagauuaggauaa

SEQ ID NO: 6382 - RNA, 19 nt, Artificial Sequence
  Synthetic
cggaagcaggacaaggaua

SEQ ID NO: 6383 - RNA, 19 nt, Artificial Sequence
  Synthetic
gagcucaucaagaagaaua

SEQ ID NO: 6384 - RNA, 19 nt, Artificial Sequence
  Synthetic
ggacuaauuuggcgcagau

SEQ ID NO: 6385 - RNA, 19 nt, Artificial Sequence
  Synthetic
ugacagaugccaaugggaa

SEQ ID NO: 6386 - RNA, 19 nt, Artificial Sequence
  Synthetic
gcuuccaaacugaggacua

SEQ ID NO: 6387 - RNA, 19 nt, Artificial Sequence
  Synthetic
gagaaaacgucagugaaaa

SEQ ID NO: 6388 - RNA, 19 nt, Artificial Sequence
  Synthetic
cagcaggguagaagcggua

SEQ ID NO: 6389 - RNA, 19 nt, Artificial Sequence
  Synthetic
cuucgaacaccaugagauu

SEQ ID NO: 6390 - RNA, 19 nt, Artificial Sequence
  Synthetic
gcuuggaugcuuugcacaa

SEQ ID NO: 6391 - RNA, 19 nt, Artificial Sequence
  Synthetic
gggauuucauaguuccaaa

SEQ ID NO: 6392 - RNA, 19 nt, Artificial Sequence
  Synthetic
gaugauagaugaaaccaaa

SEQ ID NO: 6393 - RNA, 19 nt, Artificial Sequence
  Synthetic
cuacagagcuccagaaauc

SEQ ID NO: 6394 - RNA, 19 nt, Artificial Sequence
  Synthetic
gaaaagacauggaguuauu

SEQ ID NO: 6395 - RNA, 19 nt, Artificial Sequence
  Synthetic
gaacaagcccugaagcaau

SEQ ID NO: 6396 - RNA, 19 nt, Artificial Sequence
  Synthetic
gauaugaggugcugaaaau

SEQ ID NO: 6397 - RNA, 19 nt, Artificial Sequence
  Synthetic
ucccaauaauggaggguau

SEQ ID NO: 6398 - RNA, 19 nt, Artificial Sequence
  Synthetic
ccaucuagcuuaucgauau

SEQ ID NO: 6399 - RNA, 19 nt, Artificial Sequence
  Synthetic
ggaauagccaauaagcuua

SEQ ID NO: 6400 - RNA, 19 nt, Artificial Sequence
  Synthetic
cagcacaccaauugacaua

SEQ ID NO: 6401 - RNA, 19 nt, Artificial Sequence
  Synthetic
guucaaauguacucugcaa

SEQ ID NO: 6402 - RNA, 19 nt, Artificial Sequence
  Synthetic
ccuaugagaaacuggaaau

SEQ ID NO: 6403 - RNA, 19 nt, Artificial Sequence
  Synthetic
accagaagcucuacacaua

SEQ ID NO: 6404 - RNA, 19 nt, Artificial Sequence
  Synthetic
caucuuaagaaacaggaua

SEQ ID NO: 6405 - RNA, 19 nt, Artificial Sequence
  Synthetic
gaggugagaugaagguaga

SEQ ID NO: 6406 - RNA, 19 nt, Artificial Sequence
  Synthetic
cuggagaggaugaaggaga

SEQ ID NO: 6407 - RNA, 19 nt, Artificial Sequence
  Synthetic
ccagaaaucaucuuaggaa

SEQ ID NO: 6408 - RNA, 19 nt, Artificial Sequence
  Synthetic
uggaauagccaauaagcuu

SEQ ID NO: 6409 - RNA, 19 nt, Artificial Sequence
  Synthetic
gugccaaguacuuuauuaa

SEQ ID NO: 6410 - RNA, 19 nt, Artificial Sequence
  Synthetic
cagggaaacggguaguuaa

SEQ ID NO: 6411 - RNA, 19 nt, Artificial Sequence
  Synthetic
ucacaaacuucgacaguac

SEQ ID NO: 6412 - RNA, 19 nt, Artificial Sequence
  Synthetic
aagaauuuggcaacagaaa

SEQ ID NO: 6413 - RNA, 19 nt, Artificial Sequence
  Synthetic
uuaagacacccuuggauua

SEQ ID NO: 6414 - RNA, 19 nt, Artificial Sequence
  Synthetic
cagaagcucuacacauaua

SEQ ID NO: 6415 - RNA, 19 nt, Artificial Sequence
  Synthetic
ggauaaaacugguaguaug

SEQ ID NO: 6416 - RNA, 19 nt, Artificial Sequence
  Synthetic
ugaaagggugugaugacua

SEQ ID NO: 6417 - RNA, 19 nt, Artificial Sequence
  Synthetic
cuacuguuucucaggguaa

SEQ ID NO: 6418 - RNA, 19 nt, Artificial Sequence
  Synthetic
cugcaauccuucugaacca

SEQ ID NO: 6419 - RNA, 19 nt, Artificial Sequence
  Synthetic
aagaaaagacauggaguua

SEQ ID NO: 6420 - RNA, 19 nt, Artificial Sequence
  Synthetic
acuuaaugucagaaaccaa

SEQ ID NO: 6421 - RNA, 19 nt, Artificial Sequence
  Synthetic
gcuaacuuaaugucagaaa

SEQ ID NO: 6422 - RNA, 19 nt, Artificial Sequence
  Synthetic
gcucaaggcuucagaaaua

SEQ ID NO: 6423 - RNA, 19 nt, Artificial Sequence
  Synthetic
caaagagacuacagagaaa

SEQ ID NO: 6424 - RNA, 19 nt, Artificial Sequence
  Synthetic
gggaagaagaauacgguaa

SEQ ID NO: 6425 - RNA, 19 nt, Artificial Sequence
  Synthetic
cgacacggcuccugagaaa

SEQ ID NO: 6426 - RNA, 19 nt, Artificial Sequence
  Synthetic
ccauaugaacaaagugaaa

SEQ ID NO: 6427 - RNA, 19 nt, Artificial Sequence
  Synthetic
gaaagaaggacaaagacaa

SEQ ID NO: 6428 - RNA, 19 nt, Artificial Sequence
  Synthetic
gcaagaaaguccugcugaa

SEQ ID NO: 6429 - RNA, 19 nt, Artificial Sequence
  Synthetic
ccugagaaauuuagcaaga

SEQ ID NO: 6430 - RNA, 19 nt, Artificial Sequence
  Synthetic
ccuuugagcuccugggaau

SEQ ID NO: 6431 - RNA, 19 nt, Artificial Sequence
  Synthetic
gggccaagccucuguuaaa

SEQ ID NO: 6432 - RNA, 19 nt, Artificial Sequence
  Synthetic
ccuacaauguggugcauau

SEQ ID NO: 6433 - RNA, 19 nt, Artificial Sequence
  Synthetic
ggacaagguucaaggcugu

SEQ ID NO: 6434 - RNA, 19 nt, Artificial Sequence
  Synthetic
uguaugaguugaugaagaa

SEQ ID NO: 6435 - RNA, 19 nt, Artificial Sequence
  Synthetic
ugucaucacucgagcagaa

SEQ ID NO: 6436 - RNA, 19 nt, Artificial Sequence
  Synthetic
ccaaagagacuacagagaa

SEQ ID NO: 6437 - RNA, 19 nt, Artificial Sequence
  Synthetic
agaaagaaggacaaagaca

SEQ ID NO: 6438 - RNA, 19 nt, Artificial Sequence
  Synthetic
uugaaagccugcagcuaaa

SEQ ID NO: 6439 - RNA, 19 nt, Artificial Sequence
  Synthetic
guacaauacuucagacugu

SEQ ID NO: 6440 - RNA, 19 nt, Artificial Sequence
  Synthetic
guugaaagccugcagcuaa

SEQ ID NO: 6441 - RNA, 19 nt, Artificial Sequence
  Synthetic
ucagaaagaaggacaaaga

SEQ ID NO: 6442 - RNA, 19 nt, Artificial Sequence
  Synthetic
aaagugaaauccugggcua

SEQ ID NO: 6443 - RNA, 19 nt, Artificial Sequence
  Synthetic
augaaguucuggagacaau

SEQ ID NO: 6444 - RNA, 19 nt, Artificial Sequence
  Synthetic
ccucagagcucaaggcuuc

SEQ ID NO: 6445 - RNA, 19 nt, Artificial Sequence
  Synthetic
gaggagaagucaccaaaga

SEQ ID NO: 6446 - RNA, 19 nt, Artificial Sequence
  Synthetic
gggagaaugagguggagca

SEQ ID NO: 6447 - RNA, 19 nt, Artificial Sequence
  Synthetic
cagaagugauccugggcca

SEQ ID NO: 6448 - RNA, 19 nt, Artificial Sequence
  Synthetic
ccaaagaagcaaaagguga

SEQ ID NO: 6449 - RNA, 19 nt, Artificial Sequence
  Synthetic
agacagacauucuuugauu

SEQ ID NO: 6450 - RNA, 19 nt, Artificial Sequence
  Synthetic
caaggaaggacaagguuca

SEQ ID NO: 6451 - RNA, 19 nt, Artificial Sequence
  Synthetic
uuguaugaguugaugaaga

SEQ ID NO: 6452 - RNA, 19 nt, Artificial Sequence
  Synthetic
cuccaaaggcugagggaca

SEQ ID NO: 6453 - RNA, 19 nt, Artificial Sequence
  Synthetic
ggagagaggaggagagaag

SEQ ID NO: 6454 - RNA, 19 nt, Artificial Sequence
  Synthetic
ccagguggaggaagagaua

SEQ ID NO: 6455 - RNA, 19 nt, Artificial Sequence
  Synthetic
gucgugagcuggaggaaca

SEQ ID NO: 6456 - RNA, 19 nt, Artificial Sequence
  Synthetic
gaacacuccugaacagaca

SEQ ID NO: 6457 - RNA, 19 nt, Artificial Sequence
  Synthetic
ccugcgaacuuguguuuau

SEQ ID NO: 6458 - RNA, 19 nt, Artificial Sequence
  Synthetic
ugucagugcuccagugcca

SEQ ID NO: 6459 - RNA, 19 nt, Artificial Sequence
  Synthetic
cuccuuacggccugggaaa

SEQ ID NO: 6460 - RNA, 19 nt, Artificial Sequence
  Synthetic
gcccuaagaacuuugagaa

SEQ ID NO: 6461 - RNA, 19 nt, Artificial Sequence
  Synthetic
gcgaacuuguguuuauaau

SEQ ID NO: 6462 - RNA, 19 nt, Artificial Sequence
  Synthetic
ggccacuacaggagagcuu

SEQ ID NO: 6463 - RNA, 19 nt, Artificial Sequence
  Synthetic
cuaagaacuuugagaaucc

SEQ ID NO: 6464 - RNA, 19 nt, Artificial Sequence
  Synthetic
ggaggaacauugggaagga

SEQ ID NO: 6465 - RNA, 19 nt, Artificial Sequence
  Synthetic
ccuaagaacuuugagaauc

SEQ ID NO: 6466 - RNA, 19 nt, Artificial Sequence
  Synthetic
gaggaacauugggaaggaa

SEQ ID NO: 6467 - RNA, 19 nt, Artificial Sequence
  Synthetic
ggugaacacuccugaacag

SEQ ID NO: 6468 - RNA, 19 nt, Artificial Sequence
  Synthetic
ggacccauuugccaggauu

SEQ ID NO: 6469 - RNA, 19 nt, Artificial Sequence
  Synthetic
cugaacagacagcuccuua

SEQ ID NO: 6470 - RNA, 19 nt, Artificial Sequence
  Synthetic
ggacauuuccacagucaag

SEQ ID NO: 6471 - RNA, 19 nt, Artificial Sequence
  Synthetic
acuuugagaaucccaauua

SEQ ID NO: 6472 - RNA, 19 nt, Artificial Sequence
  Synthetic
cgacaaggagugcgucuac

SEQ ID NO: 6473 - RNA, 19 nt, Artificial Sequence
  Synthetic
cuuugagaaucccaauuau

SEQ ID NO: 6474 - RNA, 19 nt, Artificial Sequence
  Synthetic
uuauuugcccuaagaacuu

SEQ ID NO: 6475 - RNA, 19 nt, Artificial Sequence
  Synthetic
acaaggagugcgucuacuu

SEQ ID NO: 6476 - RNA, 19 nt, Artificial Sequence
  Synthetic
cugcgaacuuguguuuaua

SEQ ID NO: 6477 - RNA, 19 nt, Artificial Sequence
  Synthetic
gaacuuugagaaucccaau

SEQ ID NO: 6478 - RNA, 19 nt, Artificial Sequence
  Synthetic
agaagggccugcucugcuu

SEQ ID NO: 6479 - RNA, 19 nt, Artificial Sequence
  Synthetic
cgaaggcccuggacugaag

SEQ ID NO: 6480 - RNA, 19 nt, Artificial Sequence
  Synthetic
gcucguggcccugcaugaa

SEQ ID NO: 6481 - RNA, 19 nt, Artificial Sequence
  Synthetic
guccaaggcaguucugugu

SEQ ID NO: 6482 - RNA, 19 nt, Artificial Sequence
  Synthetic
gaacaaugaagcagguaaa

SEQ ID NO: 6483 - RNA, 19 nt, Artificial Sequence
  Synthetic
gguagaaagugaagauuuu

SEQ ID NO: 6484 - RNA, 19 nt, Artificial Sequence
  Synthetic
gggaauggcuggaugauga

SEQ ID NO: 6485 - RNA, 19 nt, Artificial Sequence
  Synthetic
gaacaaaaccaaaggauuu

SEQ ID NO: 6486 - RNA, 19 nt, Artificial Sequence
  Synthetic
ggagagggaugcagugaau

SEQ ID NO: 6487 - RNA, 19 nt, Artificial Sequence
  Synthetic
gggcccagauggaggagua

SEQ ID NO: 6488 - RNA, 19 nt, Artificial Sequence
  Synthetic
ggguagaaagugaagauuu

SEQ ID NO: 6489 - RNA, 19 nt, Artificial Sequence
  Synthetic
gcgacgaugaggaagguua

SEQ ID NO: 6490 - RNA, 19 nt, Artificial Sequence
  Synthetic
cauaaaugacagugacuuu

SEQ ID NO: 6491 - RNA, 19 nt, Artificial Sequence
  Synthetic
ggacagcgacgaugaggaa

SEQ ID NO: 6492 - RNA, 19 nt, Artificial Sequence
  Synthetic
cuugagaggaacagaggaa

SEQ ID NO: 6493 - RNA, 19 nt, Artificial Sequence
  Synthetic
cgaagaagcucuccaacuu

SEQ ID NO: 6494 - RNA, 19 nt, Artificial Sequence
  Synthetic
gcuacgggcuggagaagga

SEQ ID NO: 6495 - RNA, 19 nt, Artificial Sequence
  Synthetic
ugaaggagacagaagagaa

SEQ ID NO: 6496 - RNA, 19 nt, Artificial Sequence
  Synthetic
ccacagauccacacggaga

SEQ ID NO: 6497 - RNA, 19 nt, Artificial Sequence
  Synthetic
agcacuacaucgagggcaa

SEQ ID NO: 6498 - RNA, 19 nt, Artificial Sequence
  Synthetic
cgguauagcuccagcgggu

SEQ ID NO: 6499 - RNA, 19 nt, Artificial Sequence
  Synthetic
aggagacagaagagaacaa

SEQ ID NO: 6500 - RNA, 19 nt, Artificial Sequence
  Synthetic
gggcuaggaggaaagauua

SEQ ID NO: 6501 - RNA, 19 nt, Artificial Sequence
  Synthetic
guaaagggguagaaaguga

SEQ ID NO: 6502 - RNA, 19 nt, Artificial Sequence
  Synthetic
ugagaggaacagaggaaaa

SEQ ID NO: 6503 - RNA, 19 nt, Artificial Sequence
  Synthetic
gucuacagauggaggccaa

SEQ ID NO: 6504 - RNA, 19 nt, Artificial Sequence
  Synthetic
gaacauggcagacgaagau

SEQ ID NO: 6505 - RNA, 19 nt, Artificial Sequence
  Synthetic
caaacgggcuaggaggaaa

SEQ ID NO: 6506 - RNA, 19 nt, Artificial Sequence
  Synthetic
acgcaauccagaaggccaa

SEQ ID NO: 6507 - RNA, 19 nt, Artificial Sequence
  Synthetic
gcggugaguacgacggaau

SEQ ID NO: 6508 - RNA, 19 nt, Artificial Sequence
  Synthetic
guuaauaaguacuacagca

SEQ ID NO: 6509 - RNA, 19 nt, Artificial Sequence
  Synthetic
cuggaagugcaaaggcuua

SEQ ID NO: 6510 - RNA, 19 nt, Artificial Sequence
  Synthetic
gaacauggccacucauaca

SEQ ID NO: 6511 - RNA, 19 nt, Artificial Sequence
  Synthetic
caaugaagcagguaaaauu

SEQ ID NO: 6512 - RNA, 19 nt, Artificial Sequence
  Synthetic
uggaagacuuugagggaga

SEQ ID NO: 6513 - RNA, 19 nt, Artificial Sequence
  Synthetic
cggagaaguuccagcgcua

SEQ ID NO: 6514 - RNA, 19 nt, Artificial Sequence
  Synthetic
agaucaacgugcuggaaga

SEQ ID NO: 6515 - RNA, 19 nt, Artificial Sequence
  Synthetic
uggaagugucugaggauga

SEQ ID NO: 6516 - RNA, 19 nt, Artificial Sequence
  Synthetic
gagaagagcaucagcggga

SEQ ID NO: 6517 - RNA, 19 nt, Artificial Sequence
  Synthetic
aggugaacgugaacgacua

SEQ ID NO: 6518 - RNA, 19 nt, Artificial Sequence
  Synthetic
gcuggaagacuuugaggga

SEQ ID NO: 6519 - RNA, 19 nt, Artificial Sequence
  Synthetic
gugcuuuggcugugacuuu

SEQ ID NO: 6520 - RNA, 19 nt, Artificial Sequence
  Synthetic
ucaacgugcuggaagacuu

SEQ ID NO: 6521 - RNA, 19 nt, Artificial Sequence
  Synthetic
gcgccuucucucugggcua

SEQ ID NO: 6522 - RNA, 19 nt, Artificial Sequence
  Synthetic
ggaagugucugaggaugaa

SEQ ID NO: 6523 - RNA, 19 nt, Artificial Sequence
  Synthetic
gagaaguuccagcgcuaca

SEQ ID NO: 6524 - RNA, 19 nt, Artificial Sequence
  Synthetic
ggauugugguuuggauuga

SEQ ID NO: 6525 - RNA, 19 nt, Artificial Sequence
  Synthetic
ccagagagagcaaaucgaa

SEQ ID NO: 6526 - RNA, 19 nt, Artificial Sequence
  Synthetic
caacgugcuggaagacuuu

SEQ ID NO: 6527 - RNA, 19 nt, Artificial Sequence
  Synthetic
cucacaaccugcacuggaa

SEQ ID NO: 6528 - RNA, 19 nt, Artificial Sequence
  Synthetic
ggcaugcgguguacuggaa

SEQ ID NO: 6529 - RNA, 19 nt, Artificial Sequence
  Synthetic
ugcccaagcuugagaagag

SEQ ID NO: 6530 - RNA, 19 nt, Artificial Sequence
  Synthetic
cuuccaggauugugguuug

SEQ ID NO: 6531 - RNA, 19 nt, Artificial Sequence
  Synthetic
auacucugcucuuagucua

SEQ ID NO: 6532 - RNA, 19 nt, Artificial Sequence
  Synthetic
ccaggauugugguuuggau

SEQ ID NO: 6533 - RNA, 19 nt, Artificial Sequence
  Synthetic
gcauguacagacucuauau

SEQ ID NO: 6534 - RNA, 19 nt, Artificial Sequence
  Synthetic
gcaggcauguacagacucu

SEQ ID NO: 6535 - RNA, 19 nt, Artificial Sequence
  Synthetic
gcucugguaauguuuggua

SEQ ID NO: 6536 - RNA, 19 nt, Artificial Sequence
  Synthetic
guacagacucuauaucucu

SEQ ID NO: 6537 - RNA, 19 nt, Artificial Sequence
  Synthetic
ccacguagggcacuguagu

SEQ ID NO: 6538 - RNA, 19 nt, Artificial Sequence
  Synthetic
gauugugguuuggauugaa

SEQ ID NO: 6539 - RNA, 19 nt, Artificial Sequence
  Synthetic
ggcauguacagacucuaua

SEQ ID NO: 6540 - RNA, 19 nt, Artificial Sequence
  Synthetic
gcugugacuuucauacucu

SEQ ID NO: 6541 - RNA, 19 nt, Artificial Sequence
  Synthetic
ugacguucuuggccuccua

SEQ ID NO: 6542 - RNA, 19 nt, Artificial Sequence
  Synthetic
ggaccagggcaaagaagaa

SEQ ID NO: 6543 - RNA, 19 nt, Artificial Sequence
  Synthetic
cagagaagauucagcgcuu

SEQ ID NO: 6544 - RNA, 19 nt, Artificial Sequence
  Synthetic
guucuuaccuggagagacu

SEQ ID NO: 6545 - RNA, 19 nt, Artificial Sequence
  Synthetic
gaagcagaggcaagacaaa

SEQ ID NO: 6546 - RNA, 19 nt, Artificial Sequence
  Synthetic
agaccaaaccuucaauaaa

SEQ ID NO: 6547 - RNA, 19 nt, Artificial Sequence
  Synthetic
ccgacaagauggagcauug

SEQ ID NO: 6548 - RNA, 19 nt, Artificial Sequence
  Synthetic
caucacaggcuaaagaaga

SEQ ID NO: 6549 - RNA, 19 nt, Artificial Sequence
  Synthetic
ggagaggaagucugaguca

SEQ ID NO: 6550 - RNA, 19 nt, Artificial Sequence
  Synthetic
caacgauuaccuagacauu

SEQ ID NO: 6551 - RNA, 19 nt, Artificial Sequence
  Synthetic
ggagagacuuacuacuaca

SEQ ID NO: 6552 - RNA, 19 nt, Artificial Sequence
  Synthetic
gcuaaagaagagcaguaga

SEQ ID NO: 6553 - RNA, 19 nt, Artificial Sequence
  Synthetic
gcaaggagaggaagucuga

SEQ ID NO: 6554 - RNA, 19 nt, Artificial Sequence
  Synthetic
cuggagagacuuacuacua

SEQ ID NO: 6555 - RNA, 19 nt, Artificial Sequence
  Synthetic
gagcugggccucaacgauu

SEQ ID NO: 6556 - RNA, 19 nt, Artificial Sequence
  Synthetic
caauaaaccacucaucuuu

SEQ ID NO: 6557 - RNA, 19 nt, Artificial Sequence
  Synthetic
acgauuaccuagacauugu

SEQ ID NO: 6558 - RNA, 19 nt, Artificial Sequence
  Synthetic
ggacucuucaugagguuga

SEQ ID NO: 6559 - RNA, 19 nt, Artificial Sequence
  Synthetic
gaccaaaccuucaauaaac

SEQ ID NO: 6560 - RNA, 19 nt, Artificial Sequence
  Synthetic
uagaccaaaccuucaauaa

SEQ ID NO: 6561 - RNA, 19 nt, Artificial Sequence
  Synthetic
ugggagcccuggagagagu

SEQ ID NO: 6562 - RNA, 19 nt, Artificial Sequence
  Synthetic
cuaaagaagagcaguagac

SEQ ID NO: 6563 - RNA, 19 nt, Artificial Sequence
  Synthetic
caauucagaccgacaagau

SEQ ID NO: 6564 - RNA, 19 nt, Artificial Sequence
  Synthetic
ucaauaaaccacucaucuu

SEQ ID NO: 6565 - RNA, 19 nt, Artificial Sequence
  Synthetic
ccucaucacaggcuaaaga

SEQ ID NO: 6566 - RNA, 19 nt, Artificial Sequence
  Synthetic
uggagagaguggcacauca

SEQ ID NO: 6567 - RNA, 19 nt, Artificial Sequence
  Synthetic
gguaugaucaaauccucaa

SEQ ID NO: 6568 - RNA, 19 nt, Artificial Sequence
  Synthetic
agacaaacacaggcgcuuu

SEQ ID NO: 6569 - RNA, 19 nt, Artificial Sequence
  Synthetic
ugaagcagaggcaagacaa

SEQ ID NO: 6570 - RNA, 19 nt, Artificial Sequence
  Synthetic
guugggagcccuggagaga

SEQ ID NO: 6571 - RNA, 19 nt, Artificial Sequence
  Synthetic
auaaguaucuagaccaaac

SEQ ID NO: 6572 - RNA, 19 nt, Artificial Sequence
  Synthetic
ccaucaaguuccaggagua

SEQ ID NO: 6573 - RNA, 19 nt, Artificial Sequence
  Synthetic
ggaaagagaccgaggggca

SEQ ID NO: 6574 - RNA, 19 nt, Artificial Sequence
  Synthetic
gaaggugaguggugacuau

SEQ ID NO: 6575 - RNA, 19 nt, Artificial Sequence
  Synthetic
ucugaaaugcccauggaaa

SEQ ID NO: 6576 - RNA, 19 nt, Artificial Sequence
  Synthetic
acuggaacucggcgaauaa

SEQ ID NO: 6577 - RNA, 19 nt, Artificial Sequence
  Synthetic
cuccaaacaucuacuacaa

SEQ ID NO: 6578 - RNA, 19 nt, Artificial Sequence
  Synthetic
auaagagguuccaggcaga

SEQ ID NO: 6579 - RNA, 19 nt, Artificial Sequence
  Synthetic
cugaaaugcccauggaaag

SEQ ID NO: 6580 - RNA, 19 nt, Artificial Sequence
  Synthetic
gggugcuccuccaguuuaa

SEQ ID NO: 6581 - RNA, 19 nt, Artificial Sequence
  Synthetic
gaguauagcccuaaucucu

SEQ ID NO: 6582 - RNA, 19 nt, Artificial Sequence
  Synthetic
ugaaaugcccauggaaaga

SEQ ID NO: 6583 - RNA, 19 nt, Artificial Sequence
  Synthetic
cuaugggcauccuguguau

SEQ ID NO: 6584 - RNA, 19 nt, Artificial Sequence
  Synthetic
gagccugucuacuggaacu

SEQ ID NO: 6585 - RNA, 19 nt, Artificial Sequence
  Synthetic
ccaggcagagggugguuau

SEQ ID NO: 6586 - RNA, 19 nt, Artificial Sequence
  Synthetic
gcucgcaccacgauuacua

SEQ ID NO: 6587 - RNA, 19 nt, Artificial Sequence
  Synthetic
ucacguggcuauccugaau

SEQ ID NO: 6588 - RNA, 19 nt, Artificial Sequence
  Synthetic
ggccaagccuucggagagu

SEQ ID NO: 6589 - RNA, 19 nt, Artificial Sequence
  Synthetic
uacuggaacucggcgaaua

SEQ ID NO: 6590 - RNA, 19 nt, Artificial Sequence
  Synthetic
ccucacuccucuccuaauu

SEQ ID NO: 6591 - RNA, 19 nt, Artificial Sequence
  Synthetic
aaacaucuacuacaaggua

SEQ ID NO: 6592 - RNA, 19 nt, Artificial Sequence
  Synthetic
ccaggaguauagcccuaau

SEQ ID NO: 6593 - RNA, 19 nt, Artificial Sequence
  Synthetic
aaaugcccauggaaagaga

SEQ ID NO: 6594 - RNA, 19 nt, Artificial Sequence
  Synthetic
ucaaguuccaggaguauag

SEQ ID NO: 6595 - RNA, 19 nt, Artificial Sequence
  Synthetic
gaaaaccugugucugaaau

SEQ ID NO: 6596 - RNA, 19 nt, Artificial Sequence
  Synthetic
ggaggugugugccuaacca

SEQ ID NO: 6597 - RNA, 19 nt, Artificial Sequence
  Synthetic
ccagagcccuccaaacauc

SEQ ID NO: 6598 - RNA, 19 nt, Artificial Sequence
  Synthetic
ugucugaaaugcccaugga

SEQ ID NO: 6599 - RNA, 19 nt, Artificial Sequence
  Synthetic
gaucuccgcuucaccauca

SEQ ID NO: 6600 - RNA, 19 nt, Artificial Sequence
  Synthetic
ccacgauuacuacaucauu

SEQ ID NO: 6601 - RNA, 19 nt, Artificial Sequence
  Synthetic
acuaugggcauccugugua

SEQ ID NO: 6602 - RNA, 19 nt, Artificial Sequence
  Synthetic
ggaaauauguacuacgaaa

SEQ ID NO: 6603 - RNA, 19 nt, Artificial Sequence
  Synthetic
gcuaugagauggaggaaga

SEQ ID NO: 6604 - RNA, 19 nt, Artificial Sequence
  Synthetic
ggagauaagugauggagau

SEQ ID NO: 6605 - RNA, 19 nt, Artificial Sequence
  Synthetic
ggaagaaaugguucagaaa

SEQ ID NO: 6606 - RNA, 19 nt, Artificial Sequence
  Synthetic
cagcugagaauguggaaua

SEQ ID NO: 6607 - RNA, 19 nt, Artificial Sequence
  Synthetic
ccgcaaauuccgagacgaa

SEQ ID NO: 6608 - RNA, 19 nt, Artificial Sequence
  Synthetic
caagggaguuuguggagaa

SEQ ID NO: 6609 - RNA, 19 nt, Artificial Sequence
  Synthetic
ccaaggaagccaagccaaa

SEQ ID NO: 6610 - RNA, 19 nt, Artificial Sequence
  Synthetic
ggaauuaagagaagcaaca

SEQ ID NO: 6611 - RNA, 19 nt, Artificial Sequence
  Synthetic
ucgcaaagggcaugaacua

SEQ ID NO: 6612 - RNA, 19 nt, Artificial Sequence
  Synthetic
caugagaaauuuacaggaa

SEQ ID NO: 6613 - RNA, 19 nt, Artificial Sequence
  Synthetic
ccagaaggugagaaaguua

SEQ ID NO: 6614 - RNA, 19 nt, Artificial Sequence
  Synthetic
ccauaaaugcuacgaauau

SEQ ID NO: 6615 - RNA, 19 nt, Artificial Sequence
  Synthetic
guaauuauguggugacaga

SEQ ID NO: 6616 - RNA, 19 nt, Artificial Sequence
  Synthetic
uugaggaucuugaaggaaa

SEQ ID NO: 6617 - RNA, 19 nt, Artificial Sequence
  Synthetic
ggaacuggauauucugaaa

SEQ ID NO: 6618 - RNA, 19 nt, Artificial Sequence
  Synthetic
gaucccagaaggugagaaa

SEQ ID NO: 6619 - RNA, 19 nt, Artificial Sequence
  Synthetic
cuacagcauuguuaagaaa

SEQ ID NO: 6620 - RNA, 19 nt, Artificial Sequence
  Synthetic
aggaagaaaugguucagaa

SEQ ID NO: 6621 - RNA, 19 nt, Artificial Sequence
  Synthetic
caaaguguguaacggaaua

SEQ ID NO: 6622 - RNA, 19 nt, Artificial Sequence
  Synthetic
gaaggaaacugaauucaaa

SEQ ID NO: 6623 - RNA, 19 nt, Artificial Sequence
  Synthetic
gugcggaagagaaagaaua

SEQ ID NO: 6624 - RNA, 19 nt, Artificial Sequence
  Synthetic
aaaugaagcugcucugaaa

SEQ ID NO: 6625 - RNA, 19 nt, Artificial Sequence
  Synthetic
cugcagaucaucagaggaa

SEQ ID NO: 6626 - RNA, 19 nt, Artificial Sequence
  Synthetic
gcagaucaucagaggaaau

SEQ ID NO: 6627 - RNA, 19 nt, Artificial Sequence
  Synthetic
ccacaaagcagugaauuua

SEQ ID NO: 6628 - RNA, 19 nt, Artificial Sequence
  Synthetic
ggucagaaaaccaaaauua

SEQ ID NO: 6629 - RNA, 19 nt, Artificial Sequence
  Synthetic
ugugaagcauuuacagaaa

SEQ ID NO: 6630 - RNA, 19 nt, Artificial Sequence
  Synthetic
gaaagaauaccaugcagaa

SEQ ID NO: 6631 - RNA, 19 nt, Artificial Sequence
  Synthetic
gaaaucagcaagagaggau

SEQ ID NO: 6632 - RNA, 19 nt, Artificial Sequence
  Synthetic
ccagagaaguggcaagaaa

SEQ ID NO: 6633 - RNA, 19 nt, Artificial Sequence
  Synthetic
ggucaagguuggagacuuu

SEQ ID NO: 6634 - RNA, 19 nt, Artificial Sequence
  Synthetic
cgaaauggaacaagaggaa

SEQ ID NO: 6635 - RNA, 19 nt, Artificial Sequence
  Synthetic
gcgagaaguuaaagccuua

SEQ ID NO: 6636 - RNA, 19 nt, Artificial Sequence
  Synthetic
gguuggagacuuuggguua

SEQ ID NO: 6637 - RNA, 19 nt, Artificial Sequence
  Synthetic
ggaacgaccugaagcuaua

SEQ ID NO: 6638 - RNA, 19 nt, Artificial Sequence
  Synthetic
cauaauggacauagugaua

SEQ ID NO: 6639 - RNA, 19 nt, Artificial Sequence
  Synthetic
gggaaaagguaaugcgaga

SEQ ID NO: 6640 - RNA, 19 nt, Artificial Sequence
  Synthetic
agaaauaguugcaacgauu

SEQ ID NO: 6641 - RNA, 19 nt, Artificial Sequence
  Synthetic
ccacauuacaacaagaaua

SEQ ID NO: 6642 - RNA, 19 nt, Artificial Sequence
  Synthetic
ggaaacagcuauucucaua

SEQ ID NO: 6643 - RNA, 19 nt, Artificial Sequence
  Synthetic
gguaggaucugaugaauuu

SEQ ID NO: 6644 - RNA, 19 nt, Artificial Sequence
  Synthetic
gguaaugcgagaaguuaaa

SEQ ID NO: 6645 - RNA, 19 nt, Artificial Sequence
  Synthetic
ccaaacugauuauagguaa

SEQ ID NO: 6646 - RNA, 19 nt, Artificial Sequence
  Synthetic
caacaagaauauccgcaaa

SEQ ID NO: 6647 - RNA, 19 nt, Artificial Sequence
  Synthetic
ggacauagugauaaagguu

SEQ ID NO: 6648 - RNA, 19 nt, Artificial Sequence
  Synthetic
ggcaaugagaaguggaauu

SEQ ID NO: 6649 - RNA, 19 nt, Artificial Sequence
  Synthetic
guaccauagaggagagaga

SEQ ID NO: 6650 - RNA, 19 nt, Artificial Sequence
  Synthetic
aguggaaaggugagguaua

SEQ ID NO: 6651 - RNA, 19 nt, Artificial Sequence
  Synthetic
uuacacugguggaaagaaa

SEQ ID NO: 6652 - RNA, 19 nt, Artificial Sequence
  Synthetic
gcugaaagaugaaagcaca

SEQ ID NO: 6653 - RNA, 19 nt, Artificial Sequence
  Synthetic
gcauauaguggaaagguga

SEQ ID NO: 6654 - RNA, 19 nt, Artificial Sequence
  Synthetic
caacuaacuucuucaacua

SEQ ID NO: 6655 - RNA, 19 nt, Artificial Sequence
  Synthetic
cagagcagauucauggaaa

SEQ ID NO: 6656 - RNA, 19 nt, Artificial Sequence
  Synthetic
ugauaaugcuuccaguaaa

SEQ ID NO: 6657 - RNA, 19 nt, Artificial Sequence
  Synthetic
aaauggaacaagaggaaga

SEQ ID NO: 6658 - RNA, 19 nt, Artificial Sequence
  Synthetic
agguaaugcgagaaguuaa

SEQ ID NO: 6659 - RNA, 19 nt, Artificial Sequence
  Synthetic
ggaaagaaauaguugcaac

SEQ ID NO: 6660 - RNA, 19 nt, Artificial Sequence
  Synthetic
cugcaauggaccaggauga

SEQ ID NO: 6661 - RNA, 19 nt, Artificial Sequence
  Synthetic
uauguaaggucaagggaga

SEQ ID NO: 6662 - RNA, 19 nt, Artificial Sequence
  Synthetic
ggagagaaguggaagcuaa

SEQ ID NO: 6663 - RNA, 19 nt, Artificial Sequence
  Synthetic
gaaggaaagaagagauaaa

SEQ ID NO: 6664 - RNA, 19 nt, Artificial Sequence
  Synthetic
gagaaggaaagaagagaua

SEQ ID NO: 6665 - RNA, 19 nt, Artificial Sequence
  Synthetic
agauguaguuccugaaaua

SEQ ID NO: 6666 - RNA, 19 nt, Artificial Sequence
  Synthetic
caagauauguggcaagaaa

SEQ ID NO: 6667 - RNA, 19 nt, Artificial Sequence
  Synthetic
ggaacaaaguccugaagau

SEQ ID NO: 6668 - RNA, 19 nt, Artificial Sequence
  Synthetic
cgacugaggcugugcacua

SEQ ID NO: 6669 - RNA, 19 nt, Artificial Sequence
  Synthetic
caaauuagucugugaugaa

SEQ ID NO: 6670 - RNA, 19 nt, Artificial Sequence
  Synthetic
gcaaagauaccucaaauua

SEQ ID NO: 6671 - RNA, 19 nt, Artificial Sequence
  Synthetic
ggaggaaucuguuacaaua

SEQ ID NO: 6672 - RNA, 19 nt, Artificial Sequence
  Synthetic
gaacagaaacagaauucaa

SEQ ID NO: 6673 - RNA, 19 nt, Artificial Sequence
  Synthetic
ggaaauugcuaguuuguca

SEQ ID NO: 6674 - RNA, 19 nt, Artificial Sequence
  Synthetic
gaugaagauugcaaugaaa

SEQ ID NO: 6675 - RNA, 19 nt, Artificial Sequence
  Synthetic
gcacaaagggaaauguauu

SEQ ID NO: 6676 - RNA, 19 nt, Artificial Sequence
  Synthetic
gcagagaagcuuccgauaa

SEQ ID NO: 6677 - RNA, 19 nt, Artificial Sequence
  Synthetic
cagagaagcuuccgauaau

SEQ ID NO: 6678 - RNA, 19 nt, Artificial Sequence
  Synthetic
cagcauagcuauagacaag

SEQ ID NO: 6679 - RNA, 19 nt, Artificial Sequence
  Synthetic
ccuaacuggugaagaagua

SEQ ID NO: 6680 - RNA, 19 nt, Artificial Sequence
  Synthetic
gcaauucuguggugcauaa

SEQ ID NO: 6681 - RNA, 19 nt, Artificial Sequence
  Synthetic
ggaugaagauugcaaugaa

SEQ ID NO: 6682 - RNA, 19 nt, Artificial Sequence
  Synthetic
aaaguggauuugaggguua

SEQ ID NO: 6683 - RNA, 19 nt, Artificial Sequence
  Synthetic
cagaacugcucaagaguga

SEQ ID NO: 6684 - RNA, 19 nt, Artificial Sequence
  Synthetic
gcaaagggcuguaccugaa

SEQ ID NO: 6685 - RNA, 19 nt, Artificial Sequence
  Synthetic
gaacaggcauuuaacacaa

SEQ ID NO: 6686 - RNA, 19 nt, Artificial Sequence
  Synthetic
uagaagaacuggccaagaa

SEQ ID NO: 6687 - RNA, 19 nt, Artificial Sequence
  Synthetic
gaacaaaguccugaagauu

SEQ ID NO: 6688 - RNA, 19 nt, Artificial Sequence
  Synthetic
gagagauucuggauggauu

SEQ ID NO: 6689 - RNA, 19 nt, Artificial Sequence
  Synthetic
ggaaagaaauggcuaagca

SEQ ID NO: 6690 - RNA, 19 nt, Artificial Sequence
  Synthetic
cagcagaaaucauguacga

SEQ ID NO: 6691 - RNA, 19 nt, Artificial Sequence
  Synthetic
ugaaaggaauggcagagaa

SEQ ID NO: 6692 - RNA, 19 nt, Artificial Sequence
  Synthetic
acaaagaauuuaagggcuu

SEQ ID NO: 6693 - RNA, 19 nt, Artificial Sequence
  Synthetic
ggugagaauuuauggcaau

SEQ ID NO: 6694 - RNA, 19 nt, Artificial Sequence
  Synthetic
gguauaaagaugucaguuu

SEQ ID NO: 6695 - RNA, 19 nt, Artificial Sequence
  Synthetic
gcuaaagaugggaaaguau

SEQ ID NO: 6696 - RNA, 19 nt, Artificial Sequence
  Synthetic
auagagaacuacagaguca

SEQ ID NO: 6697 - RNA, 19 nt, Artificial Sequence
  Synthetic
guaaagaguuuucgagugu

SEQ ID NO: 6698 - RNA, 19 nt, Artificial Sequence
  Synthetic
augaggaaguaaagaguuu

SEQ ID NO: 6699 - RNA, 19 nt, Artificial Sequence
  Synthetic
ugaaaaggagguagaaaua

SEQ ID NO: 6700 - RNA, 19 nt, Artificial Sequence
  Synthetic
uggcaauaagacugaguua

SEQ ID NO: 6701 - RNA, 19 nt, Artificial Sequence
  Synthetic
ucacguucguugaguguaa

SEQ ID NO: 6702 - RNA, 19 nt, Artificial Sequence
  Synthetic
gagaagcacuggauccaaa

SEQ ID NO: 6703 - RNA, 19 nt, Artificial Sequence
  Synthetic
gaagagaugacuuggauga

SEQ ID NO: 6704 - RNA, 19 nt, Artificial Sequence
  Synthetic
auguaguccuggugagaau

SEQ ID NO: 6705 - RNA, 19 nt, Artificial Sequence
  Synthetic
gauacaacuaccuggcaua

SEQ ID NO: 6706 - RNA, 19 nt, Artificial Sequence
  Synthetic
cugaaaaggagguagaaau

SEQ ID NO: 6707 - RNA, 19 nt, Artificial Sequence
  Synthetic
cuugaugcauuguaaguaa

SEQ ID NO: 6708 - RNA, 19 nt, Artificial Sequence
  Synthetic
acugaaugaugucaagaaa

SEQ ID NO: 6709 - RNA, 19 nt, Artificial Sequence
  Synthetic
ggacugaaguuacugaaaa

SEQ ID NO: 6710 - RNA, 19 nt, Artificial Sequence
  Synthetic
ugagaaacaaggugaugua

SEQ ID NO: 6711 - RNA, 19 nt, Artificial Sequence
  Synthetic
aguuauuagucgaucgaga

SEQ ID NO: 6712 - RNA, 19 nt, Artificial Sequence
  Synthetic
agaaauauaccuacugcua

SEQ ID NO: 6713 - RNA, 19 nt, Artificial Sequence
  Synthetic
ccacaggauuugcagauga

SEQ ID NO: 6714 - RNA, 19 nt, Artificial Sequence
  Synthetic
auuaaaagugccugaguaa

SEQ ID NO: 6715 - RNA, 19 nt, Artificial Sequence
  Synthetic
ggacuaugcuaugaauuua

SEQ ID NO: 6716 - RNA, 19 nt, Artificial Sequence
  Synthetic
ggcuaaagaugggaaagua

SEQ ID NO: 6717 - RNA, 19 nt, Artificial Sequence
  Synthetic
gugagaauuuauggcaaua

SEQ ID NO: 6718 - RNA, 19 nt, Artificial Sequence
  Synthetic
acagauggaaucacaaaua

SEQ ID NO: 6719 - RNA, 19 nt, Artificial Sequence
  Synthetic
cuugaagccuacaaagaau

SEQ ID NO: 6720 - RNA, 19 nt, Artificial Sequence
  Synthetic
caauaauggacuaugcuau

SEQ ID NO: 6721 - RNA, 19 nt, Artificial Sequence
  Synthetic
cguaugugguggauuagaa

SEQ ID NO: 6722 - RNA, 19 nt, Artificial Sequence
  Synthetic
ucacagaauuuauggagaa

SEQ ID NO: 6723 - RNA, 19 nt, Artificial Sequence
  Synthetic
ccagaaacaucuuggugaa

SEQ ID NO: 6724 - RNA, 19 nt, Artificial Sequence
  Synthetic
cauaggagaaggagaguuu

SEQ ID NO: 6725 - RNA, 19 nt, Artificial Sequence
  Synthetic
augaagaacugcugggcau

SEQ ID NO: 6726 - RNA, 19 nt, Artificial Sequence
  Synthetic
ugacagagcugcagccuga

SEQ ID NO: 6727 - RNA, 19 nt, Artificial Sequence
  Synthetic
ccacauacaucgucagagu

SEQ ID NO: 6728 - RNA, 19 nt, Artificial Sequence
  Synthetic
gaaacaucuuggugaauca

SEQ ID NO: 6729 - RNA, 19 nt, Artificial Sequence
  Synthetic
caagcaaggcacagggaga

SEQ ID NO: 6730 - RNA, 19 nt, Artificial Sequence
  Synthetic
ggaagguggcaguggcgaa

SEQ ID NO: 6731 - RNA, 19 nt, Artificial Sequence
  Synthetic
gcaugaacuaccucaguaa

SEQ ID NO: 6732 - RNA, 19 nt, Artificial Sequence
  Synthetic
uggaaggcgucgucacaaa

SEQ ID NO: 6733 - RNA, 19 nt, Artificial Sequence
  Synthetic
gcugaagccuuauguggua

SEQ ID NO: 6734 - RNA, 19 nt, Artificial Sequence
  Synthetic
gagugaacagcaacagaua

SEQ ID NO: 6735 - RNA, 19 nt, Artificial Sequence
  Synthetic
gaucaugaguuucggacca

SEQ ID NO: 6736 - RNA, 19 nt, Artificial Sequence
  Synthetic
augcaaggacgcagagaca

SEQ ID NO: 6737 - RNA, 19 nt, Artificial Sequence
  Synthetic
ugugguaccuccaggcaua

SEQ ID NO: 6738 - RNA, 19 nt, Artificial Sequence
  Synthetic
ccugacuggaggagagauu

SEQ ID NO: 6739 - RNA, 19 nt, Artificial Sequence
  Synthetic
ugagacuggugaagaaaga

SEQ ID NO: 6740 - RNA, 19 nt, Artificial Sequence
  Synthetic
gggcauagcaucuggcaug

SEQ ID NO: 6741 - RNA, 19 nt, Artificial Sequence
  Synthetic
aaagauggguggagugaac

SEQ ID NO: 6742 - RNA, 19 nt, Artificial Sequence
  Synthetic
gcgcauucuuugcaguauu

SEQ ID NO: 6743 - RNA, 19 nt, Artificial Sequence
  Synthetic
gcaaggacgcagagacacu

SEQ ID NO: 6744 - RNA, 19 nt, Artificial Sequence
  Synthetic
ccucugggcugcaaggaga

SEQ ID NO: 6745 - RNA, 19 nt, Artificial Sequence
  Synthetic
cucugagacuggugaagaa

SEQ ID NO: 6746 - RNA, 19 nt, Artificial Sequence
  Synthetic
gaggacaagcuguggcuga

SEQ ID NO: 6747 - RNA, 19 nt, Artificial Sequence
  Synthetic
aagcugugcugaagccuua

SEQ ID NO: 6748 - RNA, 19 nt, Artificial Sequence
  Synthetic
gaggacaagcugugcugaa

SEQ ID NO: 6749 - RNA, 19 nt, Artificial Sequence
  Synthetic
gcaagacuguggccauuaa

SEQ ID NO: 6750 - RNA, 19 nt, Artificial Sequence
  Synthetic
gaagaaagaaccgaggcaa

SEQ ID NO: 6751 - RNA, 19 nt, Artificial Sequence
  Synthetic
ccgcuggguugguggaagu

SEQ ID NO: 6752 - RNA, 19 nt, Artificial Sequence
  Synthetic
gaauaaaguugcagaugau

SEQ ID NO: 6753 - RNA, 19 nt, Artificial Sequence
  Synthetic
ggaauaaaguugcagauga

SEQ ID NO: 6754 - RNA, 19 nt, Artificial Sequence
  Synthetic
gaucggagcaggagaguuu

SEQ ID NO: 6755 - RNA, 19 nt, Artificial Sequence
  Synthetic
gcagcaaggugcacgaauu

SEQ ID NO: 6756 - RNA, 19 nt, Artificial Sequence
  Synthetic
gcaugaaguaccuggccaa

SEQ ID NO: 6757 - RNA, 19 nt, Artificial Sequence
  Synthetic
ucgagaagguggugcagau

SEQ ID NO: 6758 - RNA, 19 nt, Artificial Sequence
  Synthetic
ggagaaggauggcgaguuc

SEQ ID NO: 6759 - RNA, 19 nt, Artificial Sequence
  Synthetic
ggugggaccugaugcagaa

SEQ ID NO: 6760 - RNA, 19 nt, Artificial Sequence
  Synthetic
ucacugaguacauggagaa

SEQ ID NO: 6761 - RNA, 19 nt, Artificial Sequence
  Synthetic
acacagagaagcagcgagu

SEQ ID NO: 6762 - RNA, 19 nt, Artificial Sequence
  Synthetic
acauguacuccgugugcaa

SEQ ID NO: 6763 - RNA, 19 nt, Artificial Sequence
  Synthetic
gggagguguacaagggcau

SEQ ID NO: 6764 - RNA, 19 nt, Artificial Sequence
  Synthetic
gcuacgagaagguggagga

SEQ ID NO: 6765 - RNA, 19 nt, Artificial Sequence
  Synthetic
ggagagaaugugugugugu

SEQ ID NO: 6766 - RNA, 19 nt, Artificial Sequence
  Synthetic
gcugaaagccggcuacaca

SEQ ID NO: 6767 - RNA, 19 nt, Artificial Sequence
  Synthetic
ucaccaagauugacaccau

SEQ ID NO: 6768 - RNA, 19 nt, Artificial Sequence
  Synthetic
acgacgacaucaagaggau

SEQ ID NO: 6769 - RNA, 19 nt, Artificial Sequence
  Synthetic
ucacacacccguauggcaa

SEQ ID NO: 6770 - RNA, 19 nt, Artificial Sequence
  Synthetic
acgagaagguggaggaugc

SEQ ID NO: 6771 - RNA, 19 nt, Artificial Sequence
  Synthetic
ggacuuugcugcagcugga

SEQ ID NO: 6772 - RNA, 19 nt, Artificial Sequence
  Synthetic
ugaccaacgacgacaucaa

SEQ ID NO: 6773 - RNA, 19 nt, Artificial Sequence
  Synthetic
gcacacagcugagcacuua

SEQ ID NO: 6774 - RNA, 19 nt, Artificial Sequence
  Synthetic
ugaaugacaugccgaucua

SEQ ID NO: 6775 - RNA, 19 nt, Artificial Sequence
  Synthetic
gacucaaggaccaggugaa

SEQ ID NO: 6776 - RNA, 19 nt, Artificial Sequence
  Synthetic
aauacaagcccaugaugau

SEQ ID NO: 6777 - RNA, 19 nt, Artificial Sequence
  Synthetic
acagcaaccuggucugcaa

SEQ ID NO: 6778 - RNA, 19 nt, Artificial Sequence
  Synthetic
gaacagugcuggcccgagu

SEQ ID NO: 6779 - RNA, 19 nt, Artificial Sequence
  Synthetic
cugcaaggugucugacuuu

SEQ ID NO: 6780 - RNA, 19 nt, Artificial Sequence
  Synthetic
gggcagacugugaacuuga

SEQ ID NO: 6781 - RNA, 19 nt, Artificial Sequence
  Synthetic
gcuugguuguguugagguu

SEQ ID NO: 6782 - RNA, 19 nt, Artificial Sequence
  Synthetic
gaucggaccuccagaaaua

SEQ ID NO: 6783 - RNA, 19 nt, Artificial Sequence
  Synthetic
ggugaaauuucgagagcau

SEQ ID NO: 6784 - RNA, 19 nt, Artificial Sequence
  Synthetic
gagaaugguuccuuggaua

SEQ ID NO: 6785 - RNA, 19 nt, Artificial Sequence
  Synthetic
gguaauaugaagugugcua

SEQ ID NO: 6786 - RNA, 19 nt, Artificial Sequence
  Synthetic
cagaauaguuggucaucua

SEQ ID NO: 6787 - RNA, 19 nt, Artificial Sequence
  Synthetic
guaaaauggugaagaacua

SEQ ID NO: 6788 - RNA, 19 nt, Artificial Sequence
  Synthetic
ucacagggauuuagacuua

SEQ ID NO: 6789 - RNA, 19 nt, Artificial Sequence
  Synthetic
ggacacaggaggccggaaa

SEQ ID NO: 6790 - RNA, 19 nt, Artificial Sequence
  Synthetic
ccaauaagacacucaaaua

SEQ ID NO: 6791 - RNA, 19 nt, Artificial Sequence
  Synthetic
gacaauaauucuggagaua

SEQ ID NO: 6792 - RNA, 19 nt, Artificial Sequence
  Synthetic
ggaaggaguuguuaccaaa

SEQ ID NO: 6793 - RNA, 19 nt, Artificial Sequence
  Synthetic
ggagagaaguggaauccua

SEQ ID NO: 6794 - RNA, 19 nt, Artificial Sequence
  Synthetic
ggacuuaccaggugugcaa

SEQ ID NO: 6795 - RNA, 19 nt, Artificial Sequence
  Synthetic
ggauguaauuaaagcugua

SEQ ID NO: 6796 - RNA, 19 nt, Artificial Sequence
  Synthetic
acaguaacuugguguguaa

SEQ ID NO: 6797 - RNA, 19 nt, Artificial Sequence
  Synthetic
guggauaucuagcuaguaa

SEQ ID NO: 6798 - RNA, 19 nt, Artificial Sequence
  Synthetic
agauuuauguggagcucaa

SEQ ID NO: 6799 - RNA, 19 nt, Artificial Sequence
  Synthetic
caauuuaacuagacacaga

SEQ ID NO: 6800 - RNA, 19 nt, Artificial Sequence
  Synthetic
gcaauauuccuuagucaaa

SEQ ID NO: 6801 - RNA, 19 nt, Artificial Sequence
  Synthetic
uaauagaaguugaggauug

SEQ ID NO: 6802 - RNA, 19 nt, Artificial Sequence
  Synthetic
gcaagaggcacaaauguua

SEQ ID NO: 6803 - RNA, 19 nt, Artificial Sequence
  Synthetic
gagcaucaguuuacaaaga

SEQ ID NO: 6804 - RNA, 19 nt, Artificial Sequence
  Synthetic
aacaauuggcugagaacaa

SEQ ID NO: 6805 - RNA, 19 nt, Artificial Sequence
  Synthetic
ggauugaacuucuuugaau

SEQ ID NO: 6806 - RNA, 19 nt, Artificial Sequence
  Synthetic
caacaaaacccaugcauuu

SEQ ID NO: 6807 - RNA, 19 nt, Artificial Sequence
  Synthetic
cuaugaagaaagagguuuu

SEQ ID NO: 6808 - RNA, 19 nt, Artificial Sequence
  Synthetic
ggaacaagaaacaaguuau

SEQ ID NO: 6809 - RNA, 19 nt, Artificial Sequence
  Synthetic
aaauguggguggaauauaa

SEQ ID NO: 6810 - RNA, 19 nt, Artificial Sequence
  Synthetic
uuacaaagauugacaccau

SEQ ID NO: 6811 - RNA, 19 nt, Artificial Sequence
  Synthetic
ggauaucuagcuaguaaua

SEQ ID NO: 6812 - RNA, 19 nt, Artificial Sequence
  Synthetic
gauuaaagccauugaggaa

SEQ ID NO: 6813 - RNA, 19 nt, Artificial Sequence
  Synthetic
cuaaagaagucacaagaua

SEQ ID NO: 6814 - RNA, 19 nt, Artificial Sequence
  Synthetic
ggguguauauugagauuaa

SEQ ID NO: 6815 - RNA, 19 nt, Artificial Sequence
  Synthetic
caacaacucagaagagaaa

SEQ ID NO: 6816 - RNA, 19 nt, Artificial Sequence
  Synthetic
gaaucaagguguaagaaca

SEQ ID NO: 6817 - RNA, 19 nt, Artificial Sequence
  Synthetic
gaacuuggguggauagcaa

SEQ ID NO: 6818 - RNA, 19 nt, Artificial Sequence
  Synthetic
ggagagacuuccugaguga

SEQ ID NO: 6819 - RNA, 19 nt, Artificial Sequence
  Synthetic
caguaaagccaaacaagaa

SEQ ID NO: 6820 - RNA, 19 nt, Artificial Sequence
  Synthetic
agaagcggaugaagagaaa

SEQ ID NO: 6821 - RNA, 19 nt, Artificial Sequence
  Synthetic
cagaauaacuggcuacgaa

SEQ ID NO: 6822 - RNA, 19 nt, Artificial Sequence
  Synthetic
uaacagaguacauggagaa

SEQ ID NO: 6823 - RNA, 19 nt, Artificial Sequence
  Synthetic
ccuauaaugugguaugcaa

SEQ ID NO: 6824 - RNA, 19 nt, Artificial Sequence
  Synthetic
gagaggcccuauugggaua

SEQ ID NO: 6825 - RNA, 19 nt, Artificial Sequence
  Synthetic
ggguaauccuggaauauga

SEQ ID NO: 6826 - RNA, 19 nt, Artificial Sequence
  Synthetic
uauaggaguuggugaauuu

SEQ ID NO: 6827 - RNA, 19 nt, Artificial Sequence
  Synthetic
gggagaacuuggguggaua

SEQ ID NO: 6828 - RNA, 19 nt, Artificial Sequence
  Synthetic
gaaccuaccaagugugcaa

SEQ ID NO: 6829 - RNA, 19 nt, Artificial Sequence
  Synthetic
cguuuaaccuguacuacua

SEQ ID NO: 6830 - RNA, 19 nt, Artificial Sequence
  Synthetic
ggaaggagggugggaggaa

SEQ ID NO: 6831 - RNA, 19 nt, Artificial Sequence
  Synthetic
uggaaggcguggucacuaa

SEQ ID NO: 6832 - RNA, 19 nt, Artificial Sequence
  Synthetic
uggaguagcccucagaaua

SEQ ID NO: 6833 - RNA, 19 nt, Artificial Sequence
  Synthetic
ccaucacgcaccagaauaa

SEQ ID NO: 6834 - RNA, 19 nt, Artificial Sequence
  Synthetic
ggucugggaugaaguauuu

SEQ ID NO: 6835 - RNA, 19 nt, Artificial Sequence
  Synthetic
ucugaaagcugguuauaca

SEQ ID NO: 6836 - RNA, 19 nt, Artificial Sequence
  Synthetic
ugaggaaggcuaucgguua

SEQ ID NO: 6837 - RNA, 19 nt, Artificial Sequence
  Synthetic
gaaguuaccuuauuggauu

SEQ ID NO: 6838 - RNA, 19 nt, Artificial Sequence
  Synthetic
gugccauugcagugauaua

SEQ ID NO: 6839 - RNA, 19 nt, Artificial Sequence
  Synthetic
caguaaugaucauaacaga

SEQ ID NO: 6840 - RNA, 19 nt, Artificial Sequence
  Synthetic
ccaauuacaccuuugaaau

SEQ ID NO: 6841 - RNA, 19 nt, Artificial Sequence
  Synthetic
gcaauugccuaucguaaau

SEQ ID NO: 6842 - RNA, 19 nt, Artificial Sequence
  Synthetic
gagaauggcucuuuagaua

SEQ ID NO: 6843 - RNA, 19 nt, Artificial Sequence
  Synthetic
ggagaaacaucaaggaaaa

SEQ ID NO: 6844 - RNA, 19 nt, Artificial Sequence
  Synthetic
gauuaaagcgguagaggaa

SEQ ID NO: 6845 - RNA, 19 nt, Artificial Sequence
  Synthetic
gggagaaacaucaaggaaa

SEQ ID NO: 6846 - RNA, 19 nt, Artificial Sequence
  Synthetic
gugaauggcuagaggcaau

SEQ ID NO: 6847 - RNA, 19 nt, Artificial Sequence
  Synthetic
ggaaagacgugucauauua

SEQ ID NO: 6848 - RNA, 19 nt, Artificial Sequence
  Synthetic
gcaaagugauggaacagaa

SEQ ID NO: 6849 - RNA, 19 nt, Artificial Sequence
  Synthetic
ugacacugguggaaggaaa

SEQ ID NO: 6850 - RNA, 19 nt, Artificial Sequence
  Synthetic
gaucagaaugggagaaaca

SEQ ID NO: 6851 - RNA, 19 nt, Artificial Sequence
  Synthetic
ggcaggauaugaagagaaa

SEQ ID NO: 6852 - RNA, 19 nt, Artificial Sequence
  Synthetic
gagaggagccagaagcaaa

SEQ ID NO: 6853 - RNA, 19 nt, Artificial Sequence
  Synthetic
gagaauuaccuguggcuau

SEQ ID NO: 6854 - RNA, 19 nt, Artificial Sequence
  Synthetic
gcccaaguuugaugaaaua

SEQ ID NO: 6855 - RNA, 19 nt, Artificial Sequence
  Synthetic
uggcagaaagagcgaaaua

SEQ ID NO: 6856 - RNA, 19 nt, Artificial Sequence
  Synthetic
ccagaaacaucuuaaucaa

SEQ ID NO: 6857 - RNA, 19 nt, Artificial Sequence
  Synthetic
ugacagaguauauggagaa

SEQ ID NO: 6858 - RNA, 19 nt, Artificial Sequence
  Synthetic
uggaacagaaucagaauaa

SEQ ID NO: 6859 - RNA, 19 nt, Artificial Sequence
  Synthetic
cgaauuugcuaaggagaua

SEQ ID NO: 6860 - RNA, 19 nt, Artificial Sequence
  Synthetic
gaaggaaagacgugucaua

SEQ ID NO: 6861 - RNA, 19 nt, Artificial Sequence
  Synthetic
uggacaagcugauacguaa

SEQ ID NO: 6862 - RNA, 19 nt, Artificial Sequence
  Synthetic
ugucuggaguuauggaaua

SEQ ID NO: 6863 - RNA, 19 nt, Artificial Sequence
  Synthetic
gaugaaagcuuuacagaac

SEQ ID NO: 6864 - RNA, 19 nt, Artificial Sequence
  Synthetic
acaguaaccuugugugcaa

SEQ ID NO: 6865 - RNA, 19 nt, Artificial Sequence
  Synthetic
ggcccaaguuugaugaaau

SEQ ID NO: 6866 - RNA, 19 nt, Artificial Sequence
  Synthetic
cagaagaagaucaugaaca

SEQ ID NO: 6867 - RNA, 19 nt, Artificial Sequence
  Synthetic
cauuaaacugccaggagua

SEQ ID NO: 6868 - RNA, 19 nt, Artificial Sequence
  Synthetic
uguaggaccucuaagcaaa

SEQ ID NO: 6869 - RNA, 19 nt, Artificial Sequence
  Synthetic
gagaccagcuacacgauua

SEQ ID NO: 6870 - RNA, 19 nt, Artificial Sequence
  Synthetic
cgaugaaagcuuuacagaa

SEQ ID NO: 6871 - RNA, 19 nt, Artificial Sequence
  Synthetic
cagucgaagauuugaguuu

SEQ ID NO: 6872 - RNA, 19 nt, Artificial Sequence
  Synthetic
cgagaaagaucaaagggaa

SEQ ID NO: 6873 - RNA, 19 nt, Artificial Sequence
  Synthetic
agaggaagcuacagguaaa

SEQ ID NO: 6874 - RNA, 19 nt, Artificial Sequence
  Synthetic
gaaagaaagaugaagcuua

SEQ ID NO: 6875 - RNA, 19 nt, Artificial Sequence
  Synthetic
guaauagaguucauggaaa

SEQ ID NO: 6876 - RNA, 19 nt, Artificial Sequence
  Synthetic
agacuggauuagaggauaa

SEQ ID NO: 6877 - RNA, 19 nt, Artificial Sequence
  Synthetic
caggaaacaugaugggcaa

SEQ ID NO: 6878 - RNA, 19 nt, Artificial Sequence
  Synthetic
gagaaaaccucuauguaaa

SEQ ID NO: 6879 - RNA, 19 nt, Artificial Sequence
  Synthetic
agaagaagguuaucguuua

SEQ ID NO: 6880 - RNA, 19 nt, Artificial Sequence
  Synthetic
gaagaaacgaugugaccua

SEQ ID NO: 6881 - RNA, 19 nt, Artificial Sequence
  Synthetic
aguuggaauucuagacaaa

SEQ ID NO: 6882 - RNA, 19 nt, Artificial Sequence
  Synthetic
aagcaauagaagaagguua

SEQ ID NO: 6883 - RNA, 19 nt, Artificial Sequence
  Synthetic
guccaaacaugaaaggaaa

SEQ ID NO: 6884 - RNA, 19 nt, Artificial Sequence
  Synthetic
caagauaacugaaaccuaa

SEQ ID NO: 6885 - RNA, 19 nt, Artificial Sequence
  Synthetic
aaacagaguuggaguggau

SEQ ID NO: 6886 - RNA, 19 nt, Artificial Sequence
  Synthetic
gaaaagagauguugcagua

SEQ ID NO: 6887 - RNA, 19 nt, Artificial Sequence
  Synthetic
ggcaggaauauaagagaaa

SEQ ID NO: 6888 - RNA, 19 nt, Artificial Sequence
  Synthetic
gguuagugcccauuggaaa

SEQ ID NO: 6889 - RNA, 19 nt, Artificial Sequence
  Synthetic
guaggaaugcugagaggaa

SEQ ID NO: 6890 - RNA, 19 nt, Artificial Sequence
  Synthetic
gagaauggcuacaagcuau

SEQ ID NO: 6891 - RNA, 19 nt, Artificial Sequence
  Synthetic
gaguaaugaaggagagagu

SEQ ID NO: 6892 - RNA, 19 nt, Artificial Sequence
  Synthetic
ggaacaaacagcauuuaaa

SEQ ID NO: 6893 - RNA, 19 nt, Artificial Sequence
  Synthetic
aagaagugcugguccauua

SEQ ID NO: 6894 - RNA, 19 nt, Artificial Sequence
  Synthetic
gcacugugguuauagcaaa

SEQ ID NO: 6895 - RNA, 19 nt, Artificial Sequence
  Synthetic
ggaagaaauuagugguuug

SEQ ID NO: 6896 - RNA, 19 nt, Artificial Sequence
  Synthetic
caaauuugcugcacagaau

SEQ ID NO: 6897 - RNA, 19 nt, Artificial Sequence
  Synthetic
aaauggaguuucugacuua

SEQ ID NO: 6898 - RNA, 19 nt, Artificial Sequence
  Synthetic
uagcaaagcugaccaagaa

SEQ ID NO: 6899 - RNA, 19 nt, Artificial Sequence
  Synthetic
aggcaaugcacaaaggauu

SEQ ID NO: 6900 - RNA, 19 nt, Artificial Sequence
  Synthetic
ugugauuggugcaggagaa

SEQ ID NO: 6901 - RNA, 19 nt, Artificial Sequence
  Synthetic
aguuaugucuuauggagaa

SEQ ID NO: 6902 - RNA, 19 nt, Artificial Sequence
  Synthetic
acaaggagaugcagagcua

SEQ ID NO: 6903 - RNA, 19 nt, Artificial Sequence
  Synthetic
ugacugaguacauggagaa

SEQ ID NO: 6904 - RNA, 19 nt, Artificial Sequence
  Synthetic
acgagaaggacaaggagau

SEQ ID NO: 6905 - RNA, 19 nt, Artificial Sequence
  Synthetic
aguacuacgagaaggacaa

SEQ ID NO: 6906 - RNA, 19 nt, Artificial Sequence
  Synthetic
ugaaugaggagguguguga

SEQ ID NO: 6907 - RNA, 19 nt, Artificial Sequence
  Synthetic
agaucaaguacuacgagaa

SEQ ID NO: 6908 - RNA, 19 nt, Artificial Sequence
  Synthetic
agacuaaggccuggagaga

SEQ ID NO: 6909 - RNA, 19 nt, Artificial Sequence
  Synthetic
cauccugacucuugaacuu

SEQ ID NO: 6910 - RNA, 19 nt, Artificial Sequence
  Synthetic
ggagguggagaccgggaaa

SEQ ID NO: 6911 - RNA, 19 nt, Artificial Sequence
  Synthetic
gugaaugggacaucaguga

SEQ ID NO: 6912 - RNA, 19 nt, Artificial Sequence
  Synthetic
gggacacacccaagaugua

SEQ ID NO: 6913 - RNA, 19 nt, Artificial Sequence
  Synthetic
ccaucaacgagguggacga

SEQ ID NO: 6914 - RNA, 19 nt, Artificial Sequence
  Synthetic
ggauccacaucgagaaaau

SEQ ID NO: 6915 - RNA, 19 nt, Artificial Sequence
  Synthetic
ccggcuacacggagagaca

SEQ ID NO: 6916 - RNA, 19 nt, Artificial Sequence
  Synthetic
ccaccaggguauguaaaua

SEQ ID NO: 6917 - RNA, 19 nt, Artificial Sequence
  Synthetic
gggugaugguggaugaugu

SEQ ID NO: 6918 - RNA, 19 nt, Artificial Sequence
  Synthetic
aggagaagaugcacuauca

SEQ ID NO: 6919 - RNA, 19 nt, Artificial Sequence
  Synthetic
caagaaagccaguuccuca

SEQ ID NO: 6920 - RNA, 19 nt, Artificial Sequence
  Synthetic
gaagugaauuugcuggaca

SEQ ID NO: 6921 - RNA, 19 nt, Artificial Sequence
  Synthetic
gugacugaguacauggaga

SEQ ID NO: 6922 - RNA, 19 nt, Artificial Sequence
  Synthetic
uggcagagcacaugagaug

SEQ ID NO: 6923 - RNA, 19 nt, Artificial Sequence
  Synthetic
guuaugagcgugugcuuau

SEQ ID NO: 6924 - RNA, 19 nt, Artificial Sequence
  Synthetic
gaagaugcacuaucagaau

SEQ ID NO: 6925 - RNA, 19 nt, Artificial Sequence
  Synthetic
agaagaugcacuaucagaa

SEQ ID NO: 6926 - RNA, 19 nt, Artificial Sequence
  Synthetic
ugugggaggugcuggccua

SEQ ID NO: 6927 - RNA, 19 nt, Artificial Sequence
  Synthetic
agaagaagauccugggcag

SEQ ID NO: 6928 - RNA, 19 nt, Artificial Sequence
  Synthetic
gagaucaaguacuacgaga

SEQ ID NO: 6929 - RNA, 19 nt, Artificial Sequence
  Synthetic
gcucuguggaggaggggua

SEQ ID NO: 6930 - RNA, 19 nt, Artificial Sequence
  Synthetic
cgucccaggugguggugau

SEQ ID NO: 6931 - RNA, 19 nt, Artificial Sequence
  Synthetic
acgaggagaagaugcacua

SEQ ID NO: 6932 - RNA, 19 nt, Artificial Sequence
  Synthetic
caacagaagugaagacaaa

SEQ ID NO: 6933 - RNA, 19 nt, Artificial Sequence
  Synthetic
gcgauaagcuccagcauua

SEQ ID NO: 6934 - RNA, 19 nt, Artificial Sequence
  Synthetic
cagaagaccuccugagaau

SEQ ID NO: 6935 - RNA, 19 nt, Artificial Sequence
  Synthetic
ucacagaguucauggagaa

SEQ ID NO: 6936 - RNA, 19 nt, Artificial Sequence
  Synthetic
gggaauggauggugccuau

SEQ ID NO: 6937 - RNA, 19 nt, Artificial Sequence
  Synthetic
gaagaaacguuaauggaca

SEQ ID NO: 6938 - RNA, 19 nt, Artificial Sequence
  Synthetic
gagagacccuauugggaua

SEQ ID NO: 6939 - RNA, 19 nt, Artificial Sequence
  Synthetic
ggaauguacuggagagacu

SEQ ID NO: 6940 - RNA, 19 nt, Artificial Sequence
  Synthetic
ccaucaaacucuacugcaa

SEQ ID NO: 6941 - RNA, 19 nt, Artificial Sequence
  Synthetic
ggaugaagaucuacauuga

SEQ ID NO: 6942 - RNA, 19 nt, Artificial Sequence
  Synthetic
ggaaacgggcuuauagcaa

SEQ ID NO: 6943 - RNA, 19 nt, Artificial Sequence
  Synthetic
gggaagaagucaguggcua

SEQ ID NO: 6944 - RNA, 19 nt, Artificial Sequence
  Synthetic
gcgagagcgcgaaaggaua

SEQ ID NO: 6945 - RNA, 19 nt, Artificial Sequence
  Synthetic
acaguaaccuggugugcaa

SEQ ID NO: 6946 - RNA, 19 nt, Artificial Sequence
  Synthetic
gaaacgggcuuauagcaaa

SEQ ID NO: 6947 - RNA, 19 nt, Artificial Sequence
  Synthetic
gguacuaugagaaggaaca

SEQ ID NO: 6948 - RNA, 19 nt, Artificial Sequence
  Synthetic
ugauccagcuuguggguau

SEQ ID NO: 6949 - RNA, 19 nt, Artificial Sequence
  Synthetic
gggaaaucuacguggccau

SEQ ID NO: 6950 - RNA, 19 nt, Artificial Sequence
  Synthetic
cagauaagucagucaccaa

SEQ ID NO: 6951 - RNA, 19 nt, Artificial Sequence
  Synthetic
gcaaugucuucgagcccaa

SEQ ID NO: 6952 - RNA, 19 nt, Artificial Sequence
  Synthetic
gugggaaaccaaauauaua

SEQ ID NO: 6953 - RNA, 19 nt, Artificial Sequence
  Synthetic
gaagaaagggaaggaggua

SEQ ID NO: 6954 - RNA, 19 nt, Artificial Sequence
  Synthetic
gaaggcugaugaagguaaa

SEQ ID NO: 6955 - RNA, 19 nt, Artificial Sequence
  Synthetic
acacagaagucaggagcuu

SEQ ID NO: 6956 - RNA, 19 nt, Artificial Sequence
  Synthetic
ggaaggcugaugaagguaa

SEQ ID NO: 6957 - RNA, 19 nt, Artificial Sequence
  Synthetic
ugaugaagguaaacacaga

SEQ ID NO: 6958 - RNA, 19 nt, Artificial Sequence
  Synthetic
agucagaccaacacagcaa

SEQ ID NO: 6959 - RNA, 19 nt, Artificial Sequence
  Synthetic
ggaagaagucaguggcuac

SEQ ID NO: 6960 - RNA, 19 nt, Artificial Sequence
  Synthetic
gcaugaaguaccuggcuga

SEQ ID NO: 6961 - RNA, 19 nt, Artificial Sequence
  Synthetic
gcgaaaggauaccgagaag

SEQ ID NO: 6962 - RNA, 19 nt, Artificial Sequence
  Synthetic
ccaucaagcucuacuguaa

SEQ ID NO: 6963 - RNA, 19 nt, Artificial Sequence
  Synthetic
gcgggaaauacaaggaaua

SEQ ID NO: 6964 - RNA, 19 nt, Artificial Sequence
  Synthetic
agacaagcauccaggagaa

SEQ ID NO: 6965 - RNA, 19 nt, Artificial Sequence
  Synthetic
cggacaagcugcaacacua

SEQ ID NO: 6966 - RNA, 19 nt, Artificial Sequence
  Synthetic
ggagagaaagugugugauu

SEQ ID NO: 6967 - RNA, 19 nt, Artificial Sequence
  Synthetic
gggugaagguggauaccau

SEQ ID NO: 6968 - RNA, 19 nt, Artificial Sequence
  Synthetic
acuaugagcugcaguacua

SEQ ID NO: 6969 - RNA, 19 nt, Artificial Sequence
  Synthetic
guacaacgccacagccaua

SEQ ID NO: 6970 - RNA, 19 nt, Artificial Sequence
  Synthetic
agaugaugauggaggacau

SEQ ID NO: 6971 - RNA, 19 nt, Artificial Sequence
  Synthetic
gaugaaagggacagauuga

SEQ ID NO: 6972 - RNA, 19 nt, Artificial Sequence
  Synthetic
gaggauucucauaaggaaa

SEQ ID NO: 6973 - RNA, 19 nt, Artificial Sequence
  Synthetic
ucaccgaguucauggagaa

SEQ ID NO: 6974 - RNA, 19 nt, Artificial Sequence
  Synthetic
ugacagaagccgaguacca

SEQ ID NO: 6975 - RNA, 19 nt, Artificial Sequence
  Synthetic
gggaguuugccaaggaaau

SEQ ID NO: 6976 - RNA, 19 nt, Artificial Sequence
  Synthetic
cuucgaggccguugagaau

SEQ ID NO: 6977 - RNA, 19 nt, Artificial Sequence
  Synthetic
cgggacagauggacagaca

SEQ ID NO: 6978 - RNA, 19 nt, Artificial Sequence
  Synthetic
gagcaaucaguuagugaau

SEQ ID NO: 6979 - RNA, 19 nt, Artificial Sequence
  Synthetic
gcaacucaaacgacggaaa

SEQ ID NO: 6980 - RNA, 19 nt, Artificial Sequence
  Synthetic
gcaugaaguaccuggcaga

SEQ ID NO: 6981 - RNA, 19 nt, Artificial Sequence
  Synthetic
gcaugaagaucuacaucga

SEQ ID NO: 6982 - RNA, 19 nt, Artificial Sequence
  Synthetic
gcuuuaacacgguggacga

SEQ ID NO: 6983 - RNA, 19 nt, Artificial Sequence
  Synthetic
gcuucgaggccguugagaa

SEQ ID NO: 6984 - RNA, 19 nt, Artificial Sequence
  Synthetic
ugggcaaacagaagaauuu

SEQ ID NO: 6985 - RNA, 19 nt, Artificial Sequence
  Synthetic
gaagaaacgcuaauggacu

SEQ ID NO: 6986 - RNA, 19 nt, Artificial Sequence
  Synthetic
gagagaucuuuguggccau

SEQ ID NO: 6987 - RNA, 19 nt, Artificial Sequence
  Synthetic
cuccaggacuguugaugaa

SEQ ID NO: 6988 - RNA, 19 nt, Artificial Sequence
  Synthetic
gagagaaagugugugauuu

SEQ ID NO: 6989 - RNA, 19 nt, Artificial Sequence
  Synthetic
ccuucaaccucuauuacua

SEQ ID NO: 6990 - RNA, 19 nt, Artificial Sequence
  Synthetic
ggguuuguuuacagcaauu

SEQ ID NO: 6991 - RNA, 19 nt, Artificial Sequence
  Synthetic
gggaugaccuccuguacaa

SEQ ID NO: 6992 - RNA, 19 nt, Artificial Sequence
  Synthetic
gggucuacguggagcucaa

SEQ ID NO: 6993 - RNA, 19 nt, Artificial Sequence
  Synthetic
aagaagauccugagcagua

SEQ ID NO: 6994 - RNA, 19 nt, Artificial Sequence
  Synthetic
gggaagaggugaguggcua

SEQ ID NO: 6995 - RNA, 19 nt, Artificial Sequence
  Synthetic
ucacugaguucauggaaaa

SEQ ID NO: 6996 - RNA, 19 nt, Artificial Sequence
  Synthetic
gugccguggucgacugaaa

SEQ ID NO: 6997 - RNA, 19 nt, Artificial Sequence
  Synthetic
ugugggaggucaugagcua

SEQ ID NO: 6998 - RNA, 19 nt, Artificial Sequence
  Synthetic
cagaagaccugcuccguau

SEQ ID NO: 6999 - RNA, 19 nt, Artificial Sequence
  Synthetic
gaauaaaggcaauaagaug

SEQ ID NO: 7000 - RNA, 19 nt, Artificial Sequence
  Synthetic
ccuacugggacaugagcaa

SEQ ID NO: 7001 - RNA, 19 nt, Artificial Sequence
  Synthetic
gcgucaagaucgaggaggu

SEQ ID NO: 7002 - RNA, 19 nt, Artificial Sequence
  Synthetic
gagaugaaguacuuugaga

SEQ ID NO: 7003 - RNA, 19 nt, Artificial Sequence
  Synthetic
gaagagacccucauggaca

SEQ ID NO: 7004 - RNA, 19 nt, Artificial Sequence
  Synthetic
uggacaagcucauccgcaa

SEQ ID NO: 7005 - RNA, 19 nt, Artificial Sequence
  Synthetic
ccagaaagugggugggaag

SEQ ID NO: 7006 - RNA, 19 nt, Artificial Sequence
  Synthetic
cagcagaauaaaggcaaua

SEQ ID NO: 7007 - RNA, 19 nt, Artificial Sequence
  Synthetic
agaugaaguacuuugagaa

SEQ ID NO: 7008 - RNA, 19 nt, Artificial Sequence
  Synthetic
cagaauaaaggcaauaaga

SEQ ID NO: 7009 - RNA, 19 nt, Artificial Sequence
  Synthetic
gagagguguuuguggccau

SEQ ID NO: 7010 - RNA, 19 nt, Artificial Sequence
  Synthetic
gcacuggccugcacagaga

SEQ ID NO: 7011 - RNA, 19 nt, Artificial Sequence
  Synthetic
gcuccuggaaugaagguuu

SEQ ID NO: 7012 - RNA, 19 nt, Artificial Sequence
  Synthetic
ccuucaaccucuucuacua

SEQ ID NO: 7013 - RNA, 19 nt, Artificial Sequence
  Synthetic
acgugaaaguggacaccau

SEQ ID NO: 7014 - RNA, 19 nt, Artificial Sequence
  Synthetic
agaagaagauccugagcag

SEQ ID NO: 7015 - RNA, 19 nt, Artificial Sequence
  Synthetic
uugagaagagcgagggcau

SEQ ID NO: 7016 - RNA, 19 nt, Artificial Sequence
  Synthetic
uggacuacgagaugaagua

SEQ ID NO: 7017 - RNA, 19 nt, Artificial Sequence
  Synthetic
cacucaagcucuacugcaa

SEQ ID NO: 7018 - RNA, 19 nt, Artificial Sequence
  Synthetic
ggacaugagcaaccaggau

SEQ ID NO: 7019 - RNA, 19 nt, Artificial Sequence
  Synthetic
gagcgacccuacugggaca

SEQ ID NO: 7020 - RNA, 19 nt, Artificial Sequence
  Synthetic
gcgagucaagccagaacaa

SEQ ID NO: 7021 - RNA, 19 nt, Artificial Sequence
  Synthetic
ggacaaacacggacaguau

SEQ ID NO: 7022 - RNA, 19 nt, Artificial Sequence
  Synthetic
gguggugguucgagggcua

SEQ ID NO: 7023 - RNA, 19 nt, Artificial Sequence
  Synthetic
cagaauauucggacaaaca

SEQ ID NO: 7024 - RNA, 19 nt, Artificial Sequence
  Synthetic
gagcaaugggagagaagca

SEQ ID NO: 7025 - RNA, 19 nt, Artificial Sequence
  Synthetic
ccaccaaacucaaucauuu

SEQ ID NO: 7026 - RNA, 19 nt, Artificial Sequence
  Synthetic
aagcagaauauucggacaa

SEQ ID NO: 7027 - RNA, 19 nt, Artificial Sequence
  Synthetic
ggucaaauaccaugagaag

SEQ ID NO: 7028 - RNA, 19 nt, Artificial Sequence
  Synthetic
ugggagagaagcagaauau

SEQ ID NO: 7029 - RNA, 19 nt, Artificial Sequence
  Synthetic
cuaaugaggcugugaggga

SEQ ID NO: 7030 - RNA, 19 nt, Artificial Sequence
  Synthetic
cguacugggacaugagcaa

SEQ ID NO: 7031 - RNA, 19 nt, Artificial Sequence
  Synthetic
guacuaaggucuacaucga

SEQ ID NO: 7032 - RNA, 19 nt, Artificial Sequence
  Synthetic
ccgggaaggugaaugucaa

SEQ ID NO: 7033 - RNA, 19 nt, Artificial Sequence
  Synthetic
acaugaagucccaggccaa

SEQ ID NO: 7034 - RNA, 19 nt, Artificial Sequence
  Synthetic
gcaccuacgaaguguguga

SEQ ID NO: 7035 - RNA, 19 nt, Artificial Sequence
  Synthetic
uggaagagacccugcugaa

SEQ ID NO: 7036 - RNA, 19 nt, Artificial Sequence
  Synthetic
gauuggugcaggugaguuu

SEQ ID NO: 7037 - RNA, 19 nt, Artificial Sequence
  Synthetic
uggacuacgaggucaaaua

SEQ ID NO: 7038 - RNA, 19 nt, Artificial Sequence
  Synthetic
guacugaccugcaggaacu

SEQ ID NO: 7039 - RNA, 19 nt, Artificial Sequence
  Synthetic
gaagcagagcaaugggaga

SEQ ID NO: 7040 - RNA, 19 nt, Artificial Sequence
  Synthetic
cguccugacuucaccuaua

SEQ ID NO: 7041 - RNA, 19 nt, Artificial Sequence
  Synthetic
gaagagacccugcugaaca

SEQ ID NO: 7042 - RNA, 19 nt, Artificial Sequence
  Synthetic
ggagagaagcagaauauuc

SEQ ID NO: 7043 - RNA, 19 nt, Artificial Sequence
  Synthetic
ucauccagcucgugggcau

SEQ ID NO: 7044 - RNA, 19 nt, Artificial Sequence
  Synthetic
uggacaagaugauccggaa

SEQ ID NO: 7045 - RNA, 19 nt, Artificial Sequence
  Synthetic
gagggaaccuguuucacua

SEQ ID NO: 7046 - RNA, 19 nt, Artificial Sequence
  Synthetic
acagcaaccucgucugcaa

SEQ ID NO: 7047 - RNA, 19 nt, Artificial Sequence
  Synthetic
caaugggagagaagcagaa

SEQ ID NO: 7048 - RNA, 19 nt, Artificial Sequence
  Synthetic
uggcgggacaccagaagaa

SEQ ID NO: 7049 - RNA, 19 nt, Artificial Sequence
  Synthetic
cguccggacuucaccuaua

SEQ ID NO: 7050 - RNA, 19 nt, Artificial Sequence
  Synthetic
gagaguaaaugaagagaaa

SEQ ID NO: 7051 - RNA, 19 nt, Artificial Sequence
  Synthetic
gggaagaaauaaagggauu

SEQ ID NO: 7052 - RNA, 19 nt, Artificial Sequence
  Synthetic
gaggaagggaggagaguaa

SEQ ID NO: 7053 - RNA, 19 nt, Artificial Sequence
  Synthetic
gaguaaaugaagagaaaga

SEQ ID NO: 7054 - RNA, 19 nt, Artificial Sequence
  Synthetic
ggaccaagguggacacaau

SEQ ID NO: 7055 - RNA, 19 nt, Artificial Sequence
  Synthetic
aagagaaagaacuggaaua

SEQ ID NO: 7056 - RNA, 19 nt, Artificial Sequence
  Synthetic
cggccaacgggaagaaaua

SEQ ID NO: 7057 - RNA, 19 nt, Artificial Sequence
  Synthetic
ccauuggacuggagugcua

SEQ ID NO: 7058 - RNA, 19 nt, Artificial Sequence
  Synthetic
ugugggaagugaugaguua

SEQ ID NO: 7059 - RNA, 19 nt, Artificial Sequence
  Synthetic
ggaagaaauaaagggauua

SEQ ID NO: 7060 - RNA, 19 nt, Artificial Sequence
  Synthetic
ucagacacgaggagagaua

SEQ ID NO: 7061 - RNA, 19 nt, Artificial Sequence
  Synthetic
agugaugaguuauggagaa

SEQ ID NO: 7062 - RNA, 19 nt, Artificial Sequence
  Synthetic
agagaaagaacuggaauaa

SEQ ID NO: 7063 - RNA, 19 nt, Artificial Sequence
  Synthetic
ggagaguaaaugaagagaa

SEQ ID NO: 7064 - RNA, 19 nt, Artificial Sequence
  Synthetic
ggagguacuaaaugcaaua

SEQ ID NO: 7065 - RNA, 19 nt, Artificial Sequence
  Synthetic
ggacaccaccggagagaca

SEQ ID NO: 7066 - RNA, 19 nt, Artificial Sequence
  Synthetic
ugucuggagcuuugggaua

SEQ ID NO: 7067 - RNA, 19 nt, Artificial Sequence
  Synthetic
ggaagggaggagaguaaau

SEQ ID NO: 7068 - RNA, 19 nt, Artificial Sequence
  Synthetic
aggcuguccuccuggauua

SEQ ID NO: 7069 - RNA, 19 nt, Artificial Sequence
  Synthetic
agaagaagcugcugcacca

SEQ ID NO: 7070 - RNA, 19 nt, Artificial Sequence
  Synthetic
augcagagccagaggagga

SEQ ID NO: 7071 - RNA, 19 nt, Artificial Sequence
  Synthetic
ggaggagaguaaaugaaga

SEQ ID NO: 7072 - RNA, 19 nt, Artificial Sequence
  Synthetic
gacugagagccgaguguua

SEQ ID NO: 7073 - RNA, 19 nt, Artificial Sequence
  Synthetic
ucuucaaugucgugugcaa

SEQ ID NO: 7074 - RNA, 19 nt, Artificial Sequence
  Synthetic
ggaauaaccccuugcagaa

SEQ ID NO: 7075 - RNA, 19 nt, Artificial Sequence
  Synthetic
uggaagagguauugcugga

SEQ ID NO: 7076 - RNA, 19 nt, Artificial Sequence
  Synthetic
gaaagaagggaauuugcaa

SEQ ID NO: 7077 - RNA, 19 nt, Artificial Sequence
  Synthetic
gcacauggaaagcauacaa

SEQ ID NO: 7078 - RNA, 19 nt, Artificial Sequence
  Synthetic
aaagaagggaauuugcaaa

SEQ ID NO: 7079 - RNA, 19 nt, Artificial Sequence
  Synthetic
ggauuauaguccacccaau

SEQ ID NO: 7080 - RNA, 19 nt, Artificial Sequence
  Synthetic
uggaagagaucacagguua

SEQ ID NO: 7081 - RNA, 19 nt, Artificial Sequence
  Synthetic
gccagguggugcagggaaa

SEQ ID NO: 7082 - RNA, 19 nt, Artificial Sequence
  Synthetic
gggagagaguucugaggau

SEQ ID NO: 7083 - RNA, 19 nt, Artificial Sequence
  Synthetic
gcauggagcacuugcgaga

SEQ ID NO: 7084 - RNA, 19 nt, Artificial Sequence
  Synthetic
gcucacugcuggaggacga

SEQ ID NO: 7085 - RNA, 19 nt, Artificial Sequence
  Synthetic
ggagagaguucugaggauu

SEQ ID NO: 7086 - RNA, 19 nt, Artificial Sequence
  Synthetic
ggucaaauguuggaugauu

SEQ ID NO: 7087 - RNA, 19 nt, Artificial Sequence
  Synthetic
guguggaccuggaugacaa

SEQ ID NO: 7088 - RNA, 19 nt, Artificial Sequence
  Synthetic
cagaagauccggaaguaca

SEQ ID NO: 7089 - RNA, 19 nt, Artificial Sequence
  Synthetic
ccucugagacugauggcua

SEQ ID NO: 7090 - RNA, 19 nt, Artificial Sequence
  Synthetic
gggucuugauccagcggaa

SEQ ID NO: 7091 - RNA, 19 nt, Artificial Sequence
  Synthetic
cccaaagccaacaaagaaa

SEQ ID NO: 7092 - RNA, 19 nt, Artificial Sequence
  Synthetic
ugacacagcuuaugcccua

SEQ ID NO: 7093 - RNA, 19 nt, Artificial Sequence
  Synthetic
gggaguuggugucugaauu

SEQ ID NO: 7094 - RNA, 19 nt, Artificial Sequence
  Synthetic
uccaggaggugcagggcua

SEQ ID NO: 7095 - RNA, 19 nt, Artificial Sequence
  Synthetic
gcacagucuacaagggcau

SEQ ID NO: 7096 - RNA, 19 nt, Artificial Sequence
  Synthetic
ugguggaugcugaggagua

SEQ ID NO: 7097 - RNA, 19 nt, Artificial Sequence
  Synthetic
cggugcagcuggugacaca

SEQ ID NO: 7098 - RNA, 19 nt, Artificial Sequence
  Synthetic
gugccaauauccaggaguu

SEQ ID NO: 7099 - RNA, 19 nt, Artificial Sequence
  Synthetic
cggcagagaacccagagua

SEQ ID NO: 7100 - RNA, 19 nt, Artificial Sequence
  Synthetic
ccgauguauuugaugguga

SEQ ID NO: 7101 - RNA, 19 nt, Artificial Sequence
  Synthetic
cggccaagauuccgggagu

SEQ ID NO: 7102 - RNA, 19 nt, Artificial Sequence
  Synthetic
agagugauguguggaguua

SEQ ID NO: 7103 - RNA, 19 nt, Artificial Sequence
  Synthetic
ggccagaggacgagugugu

SEQ ID NO: 7104 - RNA, 19 nt, Artificial Sequence
  Synthetic
cuucgaagccucacagaga

SEQ ID NO: 7105 - RNA, 19 nt, Artificial Sequence
  Synthetic
gggaccagcucuuucggaa

SEQ ID NO: 7106 - RNA, 19 nt, Artificial Sequence
  Synthetic
auggagacccgcugaacaa

SEQ ID NO: 7107 - RNA, 19 nt, Artificial Sequence
  Synthetic
agacagaguaccaugcaga

SEQ ID NO: 7108 - RNA, 19 nt, Artificial Sequence
  Synthetic
gcuccaaguguuugagacu

SEQ ID NO: 7109 - RNA, 19 nt, Artificial Sequence
  Synthetic
aaaucuuagacgaagcaua

SEQ ID NO: 7110 - RNA, 19 nt, Artificial Sequence
  Synthetic
ggaccgagaugcugagaua

SEQ ID NO: 7111 - RNA, 19 nt, Artificial Sequence
  Synthetic
gcaccaagauccugggcaa

SEQ ID NO: 7112 - RNA, 19 nt, Artificial Sequence
  Synthetic
agauaguggugaaggacaa

SEQ ID NO: 7113 - RNA, 19 nt, Artificial Sequence
  Synthetic
acaagaagcuagaggaagu

SEQ ID NO: 7114 - RNA, 19 nt, Artificial Sequence
  Synthetic
caagauggaaguagauaaa

SEQ ID NO: 7115 - RNA, 19 nt, Artificial Sequence
  Synthetic
cuucaaagagacagagcua

SEQ ID NO: 7116 - RNA, 19 nt, Artificial Sequence
  Synthetic
ggucauaaagagagagagu

SEQ ID NO: 7117 - RNA, 19 nt, Artificial Sequence
  Synthetic
guguaaaggaccagagcuu

SEQ ID NO: 7118 - RNA, 19 nt, Artificial Sequence
  Synthetic
acaauugacuggagggaca

SEQ ID NO: 7119 - RNA, 19 nt, Artificial Sequence
  Synthetic
cuggagauaugaaggauua

SEQ ID NO: 7120 - RNA, 19 nt, Artificial Sequence
  Synthetic
cagaugaagacuaugaaua

SEQ ID NO: 7121 - RNA, 19 nt, Artificial Sequence
  Synthetic
gguuagaggaagaggaugu

SEQ ID NO: 7122 - RNA, 19 nt, Artificial Sequence
  Synthetic
cuagaaagacagaagcuua

SEQ ID NO: 7123 - RNA, 19 nt, Artificial Sequence
  Synthetic
gagcaacauugauggauuu

SEQ ID NO: 7124 - RNA, 19 nt, Artificial Sequence
  Synthetic
gacuagacaucaagcauaa

SEQ ID NO: 7125 - RNA, 19 nt, Artificial Sequence
  Synthetic
gaucaaacauccuguguca

SEQ ID NO: 7126 - RNA, 19 nt, Artificial Sequence
  Synthetic
uuaaagucauugaggacaa

SEQ ID NO: 7127 - RNA, 19 nt, Artificial Sequence
  Synthetic
aaacaagaagcuagaggaa

SEQ ID NO: 7128 - RNA, 19 nt, Artificial Sequence
  Synthetic
aggcacaacuccagaugaa

SEQ ID NO: 7129 - RNA, 19 nt, Artificial Sequence
  Synthetic
caggauugguagugauuuu

SEQ ID NO: 7130 - RNA, 19 nt, Artificial Sequence
  Synthetic
aagaugaagaugaggagua

SEQ ID NO: 7131 - RNA, 19 nt, Artificial Sequence
  Synthetic
cugaagaagaagaugaaga

SEQ ID NO: 7132 - RNA, 19 nt, Artificial Sequence
  Synthetic
uguacuaccuugaggaaca

SEQ ID NO: 7133 - RNA, 19 nt, Artificial Sequence
  Synthetic
gaguauccacuuugggaaa

SEQ ID NO: 7134 - RNA, 19 nt, Artificial Sequence
  Synthetic
ggaaauuagugcugggcgu

SEQ ID NO: 7135 - RNA, 19 nt, Artificial Sequence
  Synthetic
aagaagaagaugaagauga

SEQ ID NO: 7136 - RNA, 19 nt, Artificial Sequence
  Synthetic
ggauggcccuugagaguau

SEQ ID NO: 7137 - RNA, 19 nt, Artificial Sequence
  Synthetic
acaagauggaaguagauaa

SEQ ID NO: 7138 - RNA, 19 nt, Artificial Sequence
  Synthetic
gggcaaagugugugaccca

SEQ ID NO: 7139 - RNA, 19 nt, Artificial Sequence
  Synthetic
augaagaacuugaauguca

SEQ ID NO: 7140 - RNA, 19 nt, Artificial Sequence
  Synthetic
ggaaagacugaaagagaaa

SEQ ID NO: 7141 - RNA, 19 nt, Artificial Sequence
  Synthetic
gggaaagacugaaagagaa

SEQ ID NO: 7142 - RNA, 19 nt, Artificial Sequence
  Synthetic
gugcaggaacggagaauaa

SEQ ID NO: 7143 - RNA, 19 nt, Artificial Sequence
  Synthetic
ccguaaugucuuagugaaa

SEQ ID NO: 7144 - RNA, 19 nt, Artificial Sequence
  Synthetic
ccucaaagauaccuaguua

SEQ ID NO: 7145 - RNA, 19 nt, Artificial Sequence
  Synthetic
agccauagacccagagaaa

SEQ ID NO: 7146 - RNA, 19 nt, Artificial Sequence
  Synthetic
gcacaaucaaccagagaau

SEQ ID NO: 7147 - RNA, 19 nt, Artificial Sequence
  Synthetic
ccuaaaugguggagucuau

SEQ ID NO: 7148 - RNA, 19 nt, Artificial Sequence
  Synthetic
cugaguaccugaagaacaa

SEQ ID NO: 7149 - RNA, 19 nt, Artificial Sequence
  Synthetic
auacagagaugcaaugaua

SEQ ID NO: 7150 - RNA, 19 nt, Artificial Sequence
  Synthetic
gaucacaacugcugcuuaa

SEQ ID NO: 7151 - RNA, 19 nt, Artificial Sequence
  Synthetic
acgcauuauucgugggaca

SEQ ID NO: 7152 - RNA, 19 nt, Artificial Sequence
  Synthetic
gauuaaagaacuugacaga

SEQ ID NO: 7153 - RNA, 19 nt, Artificial Sequence
  Synthetic
ugaaagaaacugagcugaa

SEQ ID NO: 7154 - RNA, 19 nt, Artificial Sequence
  Synthetic
ucacagaauuuaagcaaga

SEQ ID NO: 7155 - RNA, 19 nt, Artificial Sequence
  Synthetic
cagacuaccugcaggagua

SEQ ID NO: 7156 - RNA, 19 nt, Artificial Sequence
  Synthetic
ccucuaugauggugaauuu

SEQ ID NO: 7157 - RNA, 19 nt, Artificial Sequence
  Synthetic
agacaaacccaaacaagaa

SEQ ID NO: 7158 - RNA, 19 nt, Artificial Sequence
  Synthetic
gaggaaagaugccaauuaa

SEQ ID NO: 7159 - RNA, 19 nt, Artificial Sequence
  Synthetic
cugaaggaauggugugcaa

SEQ ID NO: 7160 - RNA, 19 nt, Artificial Sequence
  Synthetic
ccaagaaagcguuugacaa

SEQ ID NO: 7161 - RNA, 19 nt, Artificial Sequence
  Synthetic
guacaaugcugauggagga

SEQ ID NO: 7162 - RNA, 19 nt, Artificial Sequence
  Synthetic
guaccaagaucaaugggaa

SEQ ID NO: 7163 - RNA, 19 nt, Artificial Sequence
  Synthetic
ugaaacagcuagagaagga

SEQ ID NO: 7164 - RNA, 19 nt, Artificial Sequence
  Synthetic
augaagaggauuuggaaga

SEQ ID NO: 7165 - RNA, 19 nt, Artificial Sequence
  Synthetic
ccauagacccagagaaacu

SEQ ID NO: 7166 - RNA, 19 nt, Artificial Sequence
  Synthetic
cugcaggaguacagcacaa

SEQ ID NO: 7167 - RNA, 19 nt, Artificial Sequence
  Synthetic
agauggaaguagaagaaaa

SEQ ID NO: 7168 - RNA, 19 nt, Artificial Sequence
  Synthetic
aggcaaauguggaguucau

SEQ ID NO: 7169 - RNA, 19 nt, Artificial Sequence
  Synthetic
ggauaacauuggaucacaa

SEQ ID NO: 7170 - RNA, 19 nt, Artificial Sequence
  Synthetic
gcagagaacgacagggaca

SEQ ID NO: 7171 - RNA, 19 nt, Artificial Sequence
  Synthetic
uuugaugcuuuuagggaua

SEQ ID NO: 7172 - RNA, 19 nt, Artificial Sequence
  Synthetic
gggcagagaacgacaggga

SEQ ID NO: 7173 - RNA, 19 nt, Artificial Sequence
  Synthetic
ggucguggccaucaagaaa

SEQ ID NO: 7174 - RNA, 19 nt, Artificial Sequence
  Synthetic
ccacugacuuccuccaaua

SEQ ID NO: 7175 - RNA, 19 nt, Artificial Sequence
  Synthetic
agacagaugcccagagaac

SEQ ID NO: 7176 - RNA, 19 nt, Artificial Sequence
  Synthetic
ccaccuuccugcaaguuua

SEQ ID NO: 7177 - RNA, 19 nt, Artificial Sequence
  Synthetic
ccuauggcauuguguggaa

SEQ ID NO: 7178 - RNA, 19 nt, Artificial Sequence
  Synthetic
acagaugcccagagaacau

SEQ ID NO: 7179 - RNA, 19 nt, Artificial Sequence
  Synthetic
acauuuaccugguguuuga

SEQ ID NO: 7180 - RNA, 19 nt, Artificial Sequence
  Synthetic
gggauaagacagaugccca

SEQ ID NO: 7181 - RNA, 19 nt, Artificial Sequence
  Synthetic
gcuccaaacugcucuccua

SEQ ID NO: 7182 - RNA, 19 nt, Artificial Sequence
  Synthetic
cuggugaggucguggccau

SEQ ID NO: 7183 - RNA, 19 nt, Artificial Sequence
  Synthetic
agaacgacagggacauuua

SEQ ID NO: 7184 - RNA, 19 nt, Artificial Sequence
  Synthetic
aggaccaggccgugacaga

SEQ ID NO: 7185 - RNA, 19 nt, Artificial Sequence
  Synthetic
cugcagacacugaccugaa

SEQ ID NO: 7186 - RNA, 19 nt, Artificial Sequence
  Synthetic
guguuugaguuuauggguu

SEQ ID NO: 7187 - RNA, 19 nt, Artificial Sequence
  Synthetic
guuuguaccaguucagauu

SEQ ID NO: 7188 - RNA, 19 nt, Artificial Sequence
  Synthetic
ggacauuuaccugguguuu

SEQ ID NO: 7189 - RNA, 19 nt, Artificial Sequence
  Synthetic
gaggguggccagcguacaa

SEQ ID NO: 7190 - RNA, 19 nt, Artificial Sequence
  Synthetic
cagugaagcugugugacuu

SEQ ID NO: 7191 - RNA, 19 nt, Artificial Sequence
  Synthetic
uuaccugguguuugaguuu

SEQ ID NO: 7192 - RNA, 19 nt, Artificial Sequence
  Synthetic
cguaguggacccucgcauu

SEQ ID NO: 7193 - RNA, 19 nt, Artificial Sequence
  Synthetic
uaagacagaugcccagaga

SEQ ID NO: 7194 - RNA, 19 nt, Artificial Sequence
  Synthetic
gcacaggggcaucuaccua

SEQ ID NO: 7195 - RNA, 19 nt, Artificial Sequence
  Synthetic
gggccaguuuguaccaguu

SEQ ID NO: 7196 - RNA, 19 nt, Artificial Sequence
  Synthetic
gaccagaagccguccaaug

SEQ ID NO: 7197 - RNA, 19 nt, Artificial Sequence
  Synthetic
gaccaggccgugacagagu

SEQ ID NO: 7198 - RNA, 19 nt, Artificial Sequence
  Synthetic
gagaacgacagggacauuu

SEQ ID NO: 7199 - RNA, 19 nt, Artificial Sequence
  Synthetic
gugacaggguggccuaucu

SEQ ID NO: 7200 - RNA, 19 nt, Artificial Sequence
  Synthetic
agacagaggccaagagcaa

SEQ ID NO: 7201 - RNA, 19 nt, Artificial Sequence
  Synthetic
ccaagaugcuggagagauu

SEQ ID NO: 7202 - RNA, 19 nt, Artificial Sequence
  Synthetic
gagaauugauagagaagau

SEQ ID NO: 7203 - RNA, 19 nt, Artificial Sequence
  Synthetic
agaaggaacuggagaagau

SEQ ID NO: 7204 - RNA, 19 nt, Artificial Sequence
  Synthetic
gcacgagaauugauagaga

SEQ ID NO: 7205 - RNA, 19 nt, Artificial Sequence
  Synthetic
gcgaagacuguaaggagaa

SEQ ID NO: 7206 - RNA, 19 nt, Artificial Sequence
  Synthetic
ccaaggagacagaggccaa

SEQ ID NO: 7207 - RNA, 19 nt, Artificial Sequence
  Synthetic
ggaacaagacgauggagau

SEQ ID NO: 7208 - RNA, 19 nt, Artificial Sequence
  Synthetic
gagagaagcagcagacuuu

SEQ ID NO: 7209 - RNA, 19 nt, Artificial Sequence
  Synthetic
aagaguauguggagcagaa

SEQ ID NO: 7210 - RNA, 19 nt, Artificial Sequence
  Synthetic
cguaaauucaggaccuaua

SEQ ID NO: 7211 - RNA, 19 nt, Artificial Sequence
  Synthetic
ggacgugagcgacagaaua

SEQ ID NO: 7212 - RNA, 19 nt, Artificial Sequence
  Synthetic
gaaauaagaagcaccacua

SEQ ID NO: 7213 - RNA, 19 nt, Artificial Sequence
  Synthetic
agacgauggagaugaggaa

SEQ ID NO: 7214 - RNA, 19 nt, Artificial Sequence
  Synthetic
cguggugauaguugggaaa

SEQ ID NO: 7215 - RNA, 19 nt, Artificial Sequence
  Synthetic
cgacagaauagaaaaggaa

SEQ ID NO: 7216 - RNA, 19 nt, Artificial Sequence
  Synthetic
gcagaaggacuuugcgcau

SEQ ID NO: 7217 - RNA, 19 nt, Artificial Sequence
  Synthetic
gcaagaacaagcucaacua

SEQ ID NO: 7218 - RNA, 19 nt, Artificial Sequence
  Synthetic
ggaaguaccagcacaguga

SEQ ID NO: 7219 - RNA, 19 nt, Artificial Sequence
  Synthetic
ggagagaagcagcagacuu

SEQ ID NO: 7220 - RNA, 19 nt, Artificial Sequence
  Synthetic
ggagagccguggugaagau

SEQ ID NO: 7221 - RNA, 19 nt, Artificial Sequence
  Synthetic
cgucauugcacgagaauug

SEQ ID NO: 7222 - RNA, 19 nt, Artificial Sequence
  Synthetic
cgugaagcaguuagagaga

SEQ ID NO: 7223 - RNA, 19 nt, Artificial Sequence
  Synthetic
uggaacaagacgauggaga

SEQ ID NO: 7224 - RNA, 19 nt, Artificial Sequence
  Synthetic
cagcgaacgacgugcucaa

SEQ ID NO: 7225 - RNA, 19 nt, Artificial Sequence
  Synthetic
cgaacgacgugcucaaaca

SEQ ID NO: 7226 - RNA, 19 nt, Artificial Sequence
  Synthetic
aagauggacuggcgggaga

SEQ ID NO: 7227 - RNA, 19 nt, Artificial Sequence
  Synthetic
cagaauuggugcaggcauc

SEQ ID NO: 7228 - RNA, 19 nt, Artificial Sequence
  Synthetic
gcguggugauaguugggaa

SEQ ID NO: 7229 - RNA, 19 nt, Artificial Sequence
  Synthetic
acagagaccuaaagccaca

SEQ ID NO: 7230 - RNA, 19 nt, Artificial Sequence
  Synthetic
gagccugagucgagagaaa

SEQ ID NO: 7231 - RNA, 19 nt, Artificial Sequence
  Synthetic
aggaagagguccacgacaa

SEQ ID NO: 7232 - RNA, 19 nt, Artificial Sequence
  Synthetic
gaguggaacugcagagaca

SEQ ID NO: 7233 - RNA, 19 nt, Artificial Sequence
  Synthetic
ggaacaagaagcaccacua

SEQ ID NO: 7234 - RNA, 19 nt, Artificial Sequence
  Synthetic
cagauagaccugagaaagu

SEQ ID NO: 7235 - RNA, 19 nt, Artificial Sequence
  Synthetic
gugacuggcuggagaagga

SEQ ID NO: 7236 - RNA, 19 nt, Artificial Sequence
  Synthetic
ccaauguacgucacagaaa

SEQ ID NO: 7237 - RNA, 19 nt, Artificial Sequence
  Synthetic
acaacugggauuaaugaaa

SEQ ID NO: 7238 - RNA, 19 nt, Artificial Sequence
  Synthetic
cgagcugcauccagaagaa

SEQ ID NO: 7239 - RNA, 19 nt, Artificial Sequence
  Synthetic
caauguacgucacagaaau

SEQ ID NO: 7240 - RNA, 19 nt, Artificial Sequence
  Synthetic
ccacagaugaggugacacu

SEQ ID NO: 7241 - RNA, 19 nt, Artificial Sequence
  Synthetic
ggaugaaacuggcuucuau

SEQ ID NO: 7242 - RNA, 19 nt, Artificial Sequence
  Synthetic
uggcucaccuggaggaaga

SEQ ID NO: 7243 - RNA, 19 nt, Artificial Sequence
  Synthetic
agaaaguuccgguccuaua

SEQ ID NO: 7244 - RNA, 19 nt, Artificial Sequence
  Synthetic
ccugcauucuuuacacaua

SEQ ID NO: 7245 - RNA, 19 nt, Artificial Sequence
  Synthetic
cauuggacaccacgagcua

SEQ ID NO: 7246 - RNA, 19 nt, Artificial Sequence
  Synthetic
ggauggcucacccgggaaa

SEQ ID NO: 7247 - RNA, 19 nt, Artificial Sequence
  Synthetic
ugagaaaguuccgguccua

SEQ ID NO: 7248 - RNA, 19 nt, Artificial Sequence
  Synthetic
ggguggugcuuucagacuu

SEQ ID NO: 7249 - RNA, 19 nt, Artificial Sequence
  Synthetic
gaccaauguacgucacaga

SEQ ID NO: 7250 - RNA, 19 nt, Artificial Sequence
  Synthetic
ccugguaccugcagacacu

SEQ ID NO: 7251 - RNA, 19 nt, Artificial Sequence
  Synthetic
gaaacuggcuucuaugucu

SEQ ID NO: 7252 - RNA, 19 nt, Artificial Sequence
  Synthetic
caacugggauuaaugaaac

SEQ ID NO: 7253 - RNA, 19 nt, Artificial Sequence
  Synthetic
agauagaccugagaaaguu

SEQ ID NO: 7254 - RNA, 19 nt, Artificial Sequence
  Synthetic
gaccugaaguggacucuga

SEQ ID NO: 7255 - RNA, 19 nt, Artificial Sequence
  Synthetic
ccaugccgcugcagauaga

SEQ ID NO: 7256 - RNA, 19 nt, Artificial Sequence
  Synthetic
gaaaguuccgguccuauaa

SEQ ID NO: 7257 - RNA, 19 nt, Artificial Sequence
  Synthetic
caucgaaggaccaauguac

SEQ ID NO: 7258 - RNA, 19 nt, Artificial Sequence
  Synthetic
cugggaggguggauucuau

SEQ ID NO: 7259 - RNA, 19 nt, Artificial Sequence
  Synthetic
gcucgagacacucugcauu

SEQ ID NO: 7260 - RNA, 19 nt, Artificial Sequence
  Synthetic
gugaggagacuuagagaga

SEQ ID NO: 7261 - RNA, 19 nt, Artificial Sequence
  Synthetic
gcagcaaggugguacagaa

SEQ ID NO: 7262 - RNA, 19 nt, Artificial Sequence
  Synthetic
gcaaggugguacagaaguu

SEQ ID NO: 7263 - RNA, 19 nt, Artificial Sequence
  Synthetic
aggcaaggccagaggaacu

SEQ ID NO: 7264 - RNA, 19 nt, Artificial Sequence
  Synthetic
ccaugaagcgccaaagcua

SEQ ID NO: 7265 - RNA, 19 nt, Artificial Sequence
  Synthetic
caugaagcgccaaagcuaa

SEQ ID NO: 7266 - RNA, 19 nt, Artificial Sequence
  Synthetic
guuaaugaccucgggcuua

SEQ ID NO: 7267 - RNA, 19 nt, Artificial Sequence
  Synthetic
agaaauaccgccaggaccu

SEQ ID NO: 7268 - RNA, 19 nt, Artificial Sequence
  Synthetic
accuaggccugaugggcua

SEQ ID NO: 7269 - RNA, 19 nt, Artificial Sequence
  Synthetic
acauaguagcugagggguu

SEQ ID NO: 7270 - RNA, 19 nt, Artificial Sequence
  Synthetic
ccuuugggcgacugaacua

SEQ ID NO: 7271 - RNA, 19 nt, Artificial Sequence
  Synthetic
ucgaggaacuggaguccca

SEQ ID NO: 7272 - RNA, 19 nt, Artificial Sequence
  Synthetic
acaaggacauaguagcuga

SEQ ID NO: 7273 - RNA, 19 nt, Artificial Sequence
  Synthetic
acagcuacccuucgaggaa

SEQ ID NO: 7274 - RNA, 19 nt, Artificial Sequence
  Synthetic
guacagucacaaggacaua

SEQ ID NO: 7275 - RNA, 19 nt, Artificial Sequence
  Synthetic
gaaaugagggucuccauca

SEQ ID NO: 7276 - RNA, 19 nt, Artificial Sequence
  Synthetic
gcaggguggugcugguguu

SEQ ID NO: 7277 - RNA, 19 nt, Artificial Sequence
  Synthetic
gauccuggcucgggaagca

SEQ ID NO: 7278 - RNA, 19 nt, Artificial Sequence
  Synthetic
gcaaguacagucacaagga

SEQ ID NO: 7279 - RNA, 19 nt, Artificial Sequence
  Synthetic
gcacuagacugggacagau

SEQ ID NO: 7280 - RNA, 19 nt, Artificial Sequence
  Synthetic
ucacaaggacauaguagcu

SEQ ID NO: 7281 - RNA, 19 nt, Artificial Sequence
  Synthetic
gacgaagccacuuguccaa

SEQ ID NO: 7282 - RNA, 19 nt, Artificial Sequence
  Synthetic
cuucagagcccugcacuuu

SEQ ID NO: 7283 - RNA, 19 nt, Artificial Sequence
  Synthetic
guucaggaaacgcaacuca

SEQ ID NO: 7284 - RNA, 19 nt, Artificial Sequence
  Synthetic
agagcuaccugaggcagaa

SEQ ID NO: 7285 - RNA, 19 nt, Artificial Sequence
  Synthetic
uggcuacagucaacaucuu

SEQ ID NO: 7286 - RNA, 19 nt, Artificial Sequence
  Synthetic
ugaccucgggcuuaacuua

SEQ ID NO: 7287 - RNA, 19 nt, Artificial Sequence
  Synthetic
ccagggugguggcacuaga

SEQ ID NO: 7288 - RNA, 19 nt, Artificial Sequence
  Synthetic
aaacgcaacucagcagcaa

SEQ ID NO: 7289 - RNA, 19 nt, Artificial Sequence
  Synthetic
gcacuuugguucccugugu

SEQ ID NO: 7290 - RNA, 19 nt, Artificial Sequence
  Synthetic
gcagaaaguuugcaaguaa

SEQ ID NO: 7291 - RNA, 19 nt, Artificial Sequence
  Synthetic
cgacaaagccacaaugaaa

SEQ ID NO: 7292 - RNA, 19 nt, Artificial Sequence
  Synthetic
gcgagagagucaugggaaa

SEQ ID NO: 7293 - RNA, 19 nt, Artificial Sequence
  Synthetic
gcaagaaaaugaugggaaa

SEQ ID NO: 7294 - RNA, 19 nt, Artificial Sequence
  Synthetic
gggaaauuuuggugaagua

SEQ ID NO: 7295 - RNA, 19 nt, Artificial Sequence
  Synthetic
ggaagaaggaugaacuaaa

SEQ ID NO: 7296 - RNA, 19 nt, Artificial Sequence
  Synthetic
uguuguaucucgagaguaa

SEQ ID NO: 7297 - RNA, 19 nt, Artificial Sequence
  Synthetic
aaacagaauuggagaaguu

SEQ ID NO: 7298 - RNA, 19 nt, Artificial Sequence
  Synthetic
ugggaaaccuggugaauau

SEQ ID NO: 7299 - RNA, 19 nt, Artificial Sequence
  Synthetic
agaacaacuuaguaggaua

SEQ ID NO: 7300 - RNA, 19 nt, Artificial Sequence
  Synthetic
aggaauuacuagagcaaaa

SEQ ID NO: 7301 - RNA, 19 nt, Artificial Sequence
  Synthetic
gaggauaaccagugccuua

SEQ ID NO: 7302 - RNA, 19 nt, Artificial Sequence
  Synthetic
gaacaacuuaguaggauaa

SEQ ID NO: 7303 - RNA, 19 nt, Artificial Sequence
  Synthetic
ucacuaucaucaagagaaa

SEQ ID NO: 7304 - RNA, 19 nt, Artificial Sequence
  Synthetic
ugucauauugggagaauua

SEQ ID NO: 7305 - RNA, 19 nt, Artificial Sequence
  Synthetic
ccaaaauucucaagcaaua

SEQ ID NO: 7306 - RNA, 19 nt, Artificial Sequence
  Synthetic
gaaagaaaggagaggcuau

SEQ ID NO: 7307 - RNA, 19 nt, Artificial Sequence
  Synthetic
ccaugaugauuaaggacaa

SEQ ID NO: 7308 - RNA, 19 nt, Artificial Sequence
  Synthetic
cagaauuggagaaguuaaa

SEQ ID NO: 7309 - RNA, 19 nt, Artificial Sequence
  Synthetic
acucaaacaguuagugaaa

SEQ ID NO: 7310 - RNA, 19 nt, Artificial Sequence
  Synthetic
gcagagaugaucaagguua

SEQ ID NO: 7311 - RNA, 19 nt, Artificial Sequence
  Synthetic
augaugaaguguugggauu

SEQ ID NO: 7312 - RNA, 19 nt, Artificial Sequence
  Synthetic
ugggagaauuacugggcaa

SEQ ID NO: 7313 - RNA, 19 nt, Artificial Sequence
  Synthetic
gcaaugaacaguaguaaga

SEQ ID NO: 7314 - RNA, 19 nt, Artificial Sequence
  Synthetic
cggaagaacuuaugcaaac

SEQ ID NO: 7315 - RNA, 19 nt, Artificial Sequence
  Synthetic
gaagagaauugaagaaucu

SEQ ID NO: 7316 - RNA, 19 nt, Artificial Sequence
  Synthetic
gaucaucacuauacaacaa

SEQ ID NO: 7317 - RNA, 19 nt, Artificial Sequence
  Synthetic
gaaggaauuacuagagcaa

SEQ ID NO: 7318 - RNA, 19 nt, Artificial Sequence
  Synthetic
agagaagagaauugaagaa

SEQ ID NO: 7319 - RNA, 19 nt, Artificial Sequence
  Synthetic
agauagaggcagagaugau

SEQ ID NO: 7320 - RNA, 19 nt, Artificial Sequence
  Synthetic
uggaguaccuggagagcaa

SEQ ID NO: 7321 - RNA, 19 nt, Artificial Sequence
  Synthetic
gugacaaggccaaggacaa

SEQ ID NO: 7322 - RNA, 19 nt, Artificial Sequence
  Synthetic
agaagaauguccugaagau

SEQ ID NO: 7323 - RNA, 19 nt, Artificial Sequence
  Synthetic
ggaacugccuggugacaga

SEQ ID NO: 7324 - RNA, 19 nt, Artificial Sequence
  Synthetic
aggaauaccuggagauuag

SEQ ID NO: 7325 - RNA, 19 nt, Artificial Sequence
  Synthetic
aggaguugcugcagaccaa

SEQ ID NO: 7326 - RNA, 19 nt, Artificial Sequence
  Synthetic
aggaugaggugguggccau

SEQ ID NO: 7327 - RNA, 19 nt, Artificial Sequence
  Synthetic
gcaaagacaaggaccguga

SEQ ID NO: 7328 - RNA, 19 nt, Artificial Sequence
  Synthetic
gugaagucuugucgagaga

SEQ ID NO: 7329 - RNA, 19 nt, Artificial Sequence
  Synthetic
ggaaugaagaggagaacac

SEQ ID NO: 7330 - RNA, 19 nt, Artificial Sequence
  Synthetic
uugagaagcugaagagcca

SEQ ID NO: 7331 - RNA, 19 nt, Artificial Sequence
  Synthetic
cgaggauccugaagcagua

SEQ ID NO: 7332 - RNA, 19 nt, Artificial Sequence
  Synthetic
ggccaaguuucuacaggaa

SEQ ID NO: 7333 - RNA, 19 nt, Artificial Sequence
  Synthetic
agaccaagcuggagcaccu

SEQ ID NO: 7334 - RNA, 19 nt, Artificial Sequence
  Synthetic
cacgggaguuuguggagaa

SEQ ID NO: 7335 - RNA, 19 nt, Artificial Sequence
  Synthetic
acaagugggugcugaacca

SEQ ID NO: 7336 - RNA, 19 nt, Artificial Sequence
  Synthetic
aagaauguccugaagauca

SEQ ID NO: 7337 - RNA, 19 nt, Artificial Sequence
  Synthetic
accaggagcugcagagcau

SEQ ID NO: 7338 - RNA, 19 nt, Artificial Sequence
  Synthetic
agacaaggaccgugacaag

SEQ ID NO: 7339 - RNA, 19 nt, Artificial Sequence
  Synthetic
cagagaagaauguccugaa

SEQ ID NO: 7340 - RNA, 19 nt, Artificial Sequence
  Synthetic
gcucggaacugccugguga

SEQ ID NO: 7341 - RNA, 19 nt, Artificial Sequence
  Synthetic
gugcccaagccaagcgcaa

SEQ ID NO: 7342 - RNA, 19 nt, Artificial Sequence
  Synthetic
caccugaccucaaggccaa

SEQ ID NO: 7343 - RNA, 19 nt, Artificial Sequence
  Synthetic
gaucagugacuuugggaug

SEQ ID NO: 7344 - RNA, 19 nt, Artificial Sequence
  Synthetic
uggagauccuuaagagcca

SEQ ID NO: 7345 - RNA, 19 nt, Artificial Sequence
  Synthetic
aggacaagugggugcugaa

SEQ ID NO: 7346 - RNA, 19 nt, Artificial Sequence
  Synthetic
cuggagggcaugagaaagu

SEQ ID NO: 7347 - RNA, 19 nt, Artificial Sequence
  Synthetic
gagaagaauguccugaaga

SEQ ID NO: 7348 - RNA, 19 nt, Artificial Sequence
  Synthetic
uacuggagggcaugagaaa

SEQ ID NO: 7349 - RNA, 19 nt, Artificial Sequence
  Synthetic
gccuggugacagagaagaa

SEQ ID NO: 7350 - RNA, 19 nt, Artificial Sequence
  Synthetic
uaauaagcuuugagagcaa

SEQ ID NO: 7351 - RNA, 19 nt, Artificial Sequence
  Synthetic
cagaaaagauggaaaagaa

SEQ ID NO: 7352 - RNA, 19 nt, Artificial Sequence
  Synthetic
cauaugaggacgaggagua

SEQ ID NO: 7353 - RNA, 19 nt, Artificial Sequence
  Synthetic
ggucguuaccagagauuua

SEQ ID NO: 7354 - RNA, 19 nt, Artificial Sequence
  Synthetic
ccaaaguggcugugaagau

SEQ ID NO: 7355 - RNA, 19 nt, Artificial Sequence
  Synthetic
gcaaagaauucaaaccuga

SEQ ID NO: 7356 - RNA, 19 nt, Artificial Sequence
  Synthetic
ccacagaauuggaggcuac

SEQ ID NO: 7357 - RNA, 19 nt, Artificial Sequence
  Synthetic
gaggagaaagaaacagaua

SEQ ID NO: 7358 - RNA, 19 nt, Artificial Sequence
  Synthetic
ccucagggcuacagcagua

SEQ ID NO: 7359 - RNA, 19 nt, Artificial Sequence
  Synthetic
gggacgaugugcagagcau

SEQ ID NO: 7360 - RNA, 19 nt, Artificial Sequence
  Synthetic
acguggaguucauguguaa

SEQ ID NO: 7361 - RNA, 19 nt, Artificial Sequence
  Synthetic
ccgcacauccaguggcuaa

SEQ ID NO: 7362 - RNA, 19 nt, Artificial Sequence
  Synthetic
gggaguggguuaaacacaa

SEQ ID NO: 7363 - RNA, 19 nt, Artificial Sequence
  Synthetic
guacgaucuuucuggcaaa

SEQ ID NO: 7364 - RNA, 19 nt, Artificial Sequence
  Synthetic
ucaagcagcugguggaaga

SEQ ID NO: 7365 - RNA, 19 nt, Artificial Sequence
  Synthetic
ggguggugcuggucuguaa

SEQ ID NO: 7366 - RNA, 19 nt, Artificial Sequence
  Synthetic
gagccggucugcaaggaaa

SEQ ID NO: 7367 - RNA, 19 nt, Artificial Sequence
  Synthetic
ggacaaugugaugaagaua

SEQ ID NO: 7368 - RNA, 19 nt, Artificial Sequence
  Synthetic
ggagaaagaaacagauaac

SEQ ID NO: 7369 - RNA, 19 nt, Artificial Sequence
  Synthetic
gaagacugcuggaguuaau

SEQ ID NO: 7370 - RNA, 19 nt, Artificial Sequence
  Synthetic
ggguuaaacacaaauagaa

SEQ ID NO: 7371 - RNA, 19 nt, Artificial Sequence
  Synthetic
aggagaaagaaacagauaa

SEQ ID NO: 7372 - RNA, 19 nt, Artificial Sequence
  Synthetic
ccgcggaacccaaggacuu

SEQ ID NO: 7373 - RNA, 19 nt, Artificial Sequence
  Synthetic
ggaguggguuaaacacaaa

SEQ ID NO: 7374 - RNA, 19 nt, Artificial Sequence
  Synthetic
acagauaacaccaaaccaa

SEQ ID NO: 7375 - RNA, 19 nt, Artificial Sequence
  Synthetic
acaccugcauuguggagaa

SEQ ID NO: 7376 - RNA, 19 nt, Artificial Sequence
  Synthetic
aggcaucaguugcuauaua

SEQ ID NO: 7377 - RNA, 19 nt, Artificial Sequence
  Synthetic
cgauggagccggucugcaa

SEQ ID NO: 7378 - RNA, 19 nt, Artificial Sequence
  Synthetic
ucgggaagcauaagaauau

SEQ ID NO: 7379 - RNA, 19 nt, Artificial Sequence
  Synthetic
ggacuugguacucggcuua

SEQ ID NO: 7380 - RNA, 19 nt, Artificial Sequence
  Synthetic
ggguaauucuauugggaua

SEQ ID NO: 7381 - RNA, 19 nt, Artificial Sequence
  Synthetic
gggaguacuugcagauaaa

SEQ ID NO: 7382 - RNA, 19 nt, Artificial Sequence
  Synthetic
ggaaaaugguauaacguua

SEQ ID NO: 7383 - RNA, 19 nt, Artificial Sequence
  Synthetic
cagcauauguguaaagauu

SEQ ID NO: 7384 - RNA, 19 nt, Artificial Sequence
  Synthetic
gcugaagaguaaaggaaaa

SEQ ID NO: 7385 - RNA, 19 nt, Artificial Sequence
  Synthetic
ggaucaagcacguggaaaa

SEQ ID NO: 7386 - RNA, 19 nt, Artificial Sequence
  Synthetic
ggacaaagagauugagguu

SEQ ID NO: 7387 - RNA, 19 nt, Artificial Sequence
  Synthetic
ccgugaagauguugaaaga

SEQ ID NO: 7388 - RNA, 19 nt, Artificial Sequence
  Synthetic
cggaggagacguagaguuu

SEQ ID NO: 7389 - RNA, 19 nt, Artificial Sequence
  Synthetic
guauauaggugcuggaugu

SEQ ID NO: 7390 - RNA, 19 nt, Artificial Sequence
  Synthetic
gaucagaggaguaaauaau

SEQ ID NO: 7391 - RNA, 19 nt, Artificial Sequence
  Synthetic
cggaagauuuugucaguga

SEQ ID NO: 7392 - RNA, 19 nt, Artificial Sequence
  Synthetic
acaaagagauugagguucu

SEQ ID NO: 7393 - RNA, 19 nt, Artificial Sequence
  Synthetic
acacagaaaagauggaaaa

SEQ ID NO: 7394 - RNA, 19 nt, Artificial Sequence
  Synthetic
cauaaacggcaguguuaaa

SEQ ID NO: 7395 - RNA, 19 nt, Artificial Sequence
  Synthetic
ucacaaccaaugaggaaua

SEQ ID NO: 7396 - RNA, 19 nt, Artificial Sequence
  Synthetic
ugucagagauggagaugau

SEQ ID NO: 7397 - RNA, 19 nt, Artificial Sequence
  Synthetic
gcaaagggaaccauguaua

SEQ ID NO: 7398 - RNA, 19 nt, Artificial Sequence
  Synthetic
gagcacaaaugcaguauau

SEQ ID NO: 7399 - RNA, 19 nt, Artificial Sequence
  Synthetic
ggacagaccuuaguugaaa

SEQ ID NO: 7400 - RNA, 19 nt, Artificial Sequence
  Synthetic
ggaaggaguuuaagcagga

SEQ ID NO: 7401 - RNA, 19 nt, Artificial Sequence
  Synthetic
ccggagaugaugaggauga

SEQ ID NO: 7402 - RNA, 19 nt, Artificial Sequence
  Synthetic
guguaguggagaaugaaua

SEQ ID NO: 7403 - RNA, 19 nt, Artificial Sequence
  Synthetic
cagcugaagaguaaaggaa

SEQ ID NO: 7404 - RNA, 19 nt, Artificial Sequence
  Synthetic
acguagaguuugucugcaa

SEQ ID NO: 7405 - RNA, 19 nt, Artificial Sequence
  Synthetic
gcaagaugaaugcagauua

SEQ ID NO: 7406 - RNA, 19 nt, Artificial Sequence
  Synthetic
gaaaagaacggcaguaaau

SEQ ID NO: 7407 - RNA, 19 nt, Artificial Sequence
  Synthetic
gugaagauguugaaagaug

SEQ ID NO: 7408 - RNA, 19 nt, Artificial Sequence
  Synthetic
uagaagacuuggaucgaau

SEQ ID NO: 7409 - RNA, 19 nt, Artificial Sequence
  Synthetic
gaccuuaguugaaaugaua

SEQ ID NO: 7410 - RNA, 19 nt, Artificial Sequence
  Synthetic
guuaauaguuggaggugau

SEQ ID NO: 7411 - RNA, 19 nt, Artificial Sequence
  Synthetic
cgacaaggagcuagagguu

SEQ ID NO: 7412 - RNA, 19 nt, Artificial Sequence
  Synthetic
gaugaagaugaucgggaaa

SEQ ID NO: 7413 - RNA, 19 nt, Artificial Sequence
  Synthetic
cagugcagauggagagaca

SEQ ID NO: 7414 - RNA, 19 nt, Artificial Sequence
  Synthetic
ugaugaagaugaucgggaa

SEQ ID NO: 7415 - RNA, 19 nt, Artificial Sequence
  Synthetic
gcagauggagagacagcua

SEQ ID NO: 7416 - RNA, 19 nt, Artificial Sequence
  Synthetic
cuucaaagcaagcugguau

SEQ ID NO: 7417 - RNA, 19 nt, Artificial Sequence
  Synthetic
acaccugcgucguggagaa

SEQ ID NO: 7418 - RNA, 19 nt, Artificial Sequence
  Synthetic
agauggagaugaugaagau

SEQ ID NO: 7419 - RNA, 19 nt, Artificial Sequence
  Synthetic
uguacgugcugguggagua

SEQ ID NO: 7420 - RNA, 19 nt, Artificial Sequence
  Synthetic
gcaaugugcuggugaccga

SEQ ID NO: 7421 - RNA, 19 nt, Artificial Sequence
  Synthetic
acaaggagcuagagguucu

SEQ ID NO: 7422 - RNA, 19 nt, Artificial Sequence
  Synthetic
aggacaacgugaugaagau

SEQ ID NO: 7423 - RNA, 19 nt, Artificial Sequence
  Synthetic
ugucugagauggagaugau

SEQ ID NO: 7424 - RNA, 19 nt, Artificial Sequence
  Synthetic
ggaccuguauauuuguaaa

SEQ ID NO: 7425 - RNA, 19 nt, Artificial Sequence
  Synthetic
cugaagaacggcagggagu

SEQ ID NO: 7426 - RNA, 19 nt, Artificial Sequence
  Synthetic
ccugcgucguggagaacaa

SEQ ID NO: 7427 - RNA, 19 nt, Artificial Sequence
  Synthetic
ucaagcacguggaggugaa

SEQ ID NO: 7428 - RNA, 19 nt, Artificial Sequence
  Synthetic
ccgaggacaacgugaugaa

SEQ ID NO: 7429 - RNA, 19 nt, Artificial Sequence
  Synthetic
gcaccgcaguuuuguuuua

SEQ ID NO: 7430 - RNA, 19 nt, Artificial Sequence
  Synthetic
gagauggagaugaugaaga

SEQ ID NO: 7431 - RNA, 19 nt, Artificial Sequence
  Synthetic
ggagggaagccgugaauuc

SEQ ID NO: 7432 - RNA, 19 nt, Artificial Sequence
  Synthetic
acgcaaugcuucuagaguu

SEQ ID NO: 7433 - RNA, 19 nt, Artificial Sequence
  Synthetic
cugagauggagaugaugaa

SEQ ID NO: 7434 - RNA, 19 nt, Artificial Sequence
  Synthetic
ccuaaaagguuguuaauag

SEQ ID NO: 7435 - RNA, 19 nt, Artificial Sequence
  Synthetic
aaagacaccugguugcuaa

SEQ ID NO: 7436 - RNA, 19 nt, Artificial Sequence
  Synthetic
ugaugaagaucgcagacuu

SEQ ID NO: 7437 - RNA, 19 nt, Artificial Sequence
  Synthetic
ugaagaugcugaaagacga

SEQ ID NO: 7438 - RNA, 19 nt, Artificial Sequence
  Synthetic
ucaagcagcugguggagga

SEQ ID NO: 7439 - RNA, 19 nt, Artificial Sequence
  Synthetic
gcaaauggcguuuuauaaa

SEQ ID NO: 7440 - RNA, 19 nt, Artificial Sequence
  Synthetic
ccucgugagucuagaucua

SEQ ID NO: 7441 - RNA, 19 nt, Artificial Sequence
  Synthetic
gcucagagguggagguccu

SEQ ID NO: 7442 - RNA, 19 nt, Artificial Sequence
  Synthetic
ucaagaugcucaaagacaa

SEQ ID NO: 7443 - RNA, 19 nt, Artificial Sequence
  Synthetic
cggagauggaggugaugaa

SEQ ID NO: 7444 - RNA, 19 nt, Artificial Sequence
  Synthetic
gagcaaauggcguuuuaua

SEQ ID NO: 7445 - RNA, 19 nt, Artificial Sequence
  Synthetic
ccuaaagacugcagacauc

SEQ ID NO: 7446 - RNA, 19 nt, Artificial Sequence
  Synthetic
cugaggaaguggagcuuga

SEQ ID NO: 7447 - RNA, 19 nt, Artificial Sequence
  Synthetic
gaugaagauugcugacuuu

SEQ ID NO: 7448 - RNA, 19 nt, Artificial Sequence
  Synthetic
acguggagcugcugugcaa

SEQ ID NO: 7449 - RNA, 19 nt, Artificial Sequence
  Synthetic
gugcagaggccuuuggcau

SEQ ID NO: 7450 - RNA, 19 nt, Artificial Sequence
  Synthetic
aggacaaugugaugaagau

SEQ ID NO: 7451 - RNA, 19 nt, Artificial Sequence
  Synthetic
ccgucaagaugcucaaaga

SEQ ID NO: 7452 - RNA, 19 nt, Artificial Sequence
  Synthetic
cuggagagcugcuaugcua

SEQ ID NO: 7453 - RNA, 19 nt, Artificial Sequence
  Synthetic
ugguggaggcgcuggacaa

SEQ ID NO: 7454 - RNA, 19 nt, Artificial Sequence
  Synthetic
gaaccgcauuggaggcauu

SEQ ID NO: 7455 - RNA, 19 nt, Artificial Sequence
  Synthetic
ccaugaucguccugcagaa

SEQ ID NO: 7456 - RNA, 19 nt, Artificial Sequence
  Synthetic
cauagggaccucucgaaua

SEQ ID NO: 7457 - RNA, 19 nt, Artificial Sequence
  Synthetic
cugaggacaaugugaugaa

SEQ ID NO: 7458 - RNA, 19 nt, Artificial Sequence
  Synthetic
acacagugcucgaccuuga

SEQ ID NO: 7459 - RNA, 19 nt, Artificial Sequence
  Synthetic
ggagagcugcuaugcuaaa

SEQ ID NO: 7460 - RNA, 19 nt, Artificial Sequence
  Synthetic
ggacaaugugaugaagauu

SEQ ID NO: 7461 - RNA, 19 nt, Artificial Sequence
  Synthetic
acaccugccugguagagaa

SEQ ID NO: 7462 - RNA, 19 nt, Artificial Sequence
  Synthetic
aggagcaaauggcguuuua

SEQ ID NO: 7463 - RNA, 19 nt, Artificial Sequence
  Synthetic
ugaugaagauugcugacuu

SEQ ID NO: 7464 - RNA, 19 nt, Artificial Sequence
  Synthetic
cgacacaagaacaucauca

SEQ ID NO: 7465 - RNA, 19 nt, Artificial Sequence
  Synthetic
gagcaggagcugacaguag

SEQ ID NO: 7466 - RNA, 19 nt, Artificial Sequence
  Synthetic
gccuagagauugccagcuu

SEQ ID NO: 7467 - RNA, 19 nt, Artificial Sequence
  Synthetic
ccuaugugcaaguccuaaa

SEQ ID NO: 7468 - RNA, 19 nt, Artificial Sequence
  Synthetic
gcuggaagccugccgaaaa

SEQ ID NO: 7469 - RNA, 19 nt, Artificial Sequence
  Synthetic
gcacuaagguggcggugaa

SEQ ID NO: 7470 - RNA, 19 nt, Artificial Sequence
  Synthetic
uuggaaagauugggagaaa

SEQ ID NO: 7471 - RNA, 19 nt, Artificial Sequence
  Synthetic
guguguauguguugauuua

SEQ ID NO: 7472 - RNA, 19 nt, Artificial Sequence
  Synthetic
ccauagaguccuagcauca

SEQ ID NO: 7473 - RNA, 19 nt, Artificial Sequence
  Synthetic
gcgaucaugugaagcauua

SEQ ID NO: 7474 - RNA, 19 nt, Artificial Sequence
  Synthetic
aggcaugaauaaacgggaa

SEQ ID NO: 7475 - RNA, 19 nt, Artificial Sequence
  Synthetic
gugcaagaucgcagacuuu

SEQ ID NO: 7476 - RNA, 19 nt, Artificial Sequence
  Synthetic
gaaaggaugcagagaggca

SEQ ID NO: 7477 - RNA, 19 nt, Artificial Sequence
  Synthetic
ccacacggguucaguucaa

SEQ ID NO: 7478 - RNA, 19 nt, Artificial Sequence
  Synthetic
ucaccaagggcgagaaguu

SEQ ID NO: 7479 - RNA, 19 nt, Artificial Sequence
  Synthetic
ggacauggcagcccaggua

SEQ ID NO: 7480 - RNA, 19 nt, Artificial Sequence
  Synthetic
ucaaggacgaugaguacaa

SEQ ID NO: 7481 - RNA, 19 nt, Artificial Sequence
  Synthetic
gaacaauacugaaggugac

SEQ ID NO: 7482 - RNA, 19 nt, Artificial Sequence
  Synthetic
ucaagaacccagagggcca

SEQ ID NO: 7483 - RNA, 19 nt, Artificial Sequence
  Synthetic
ggaucagaccagaggcgau

SEQ ID NO: 7484 - RNA, 19 nt, Artificial Sequence
  Synthetic
gcaagaaauuggagccggu

SEQ ID NO: 7485 - RNA, 19 nt, Artificial Sequence
  Synthetic
gggcaaccuacuuguuuua

SEQ ID NO: 7486 - RNA, 19 nt, Artificial Sequence
  Synthetic
gaagagugguacuuuggaa

SEQ ID NO: 7487 - RNA, 19 nt, Artificial Sequence
  Synthetic
gagaaaggaugcagagagg

SEQ ID NO: 7488 - RNA, 19 nt, Artificial Sequence
  Synthetic
ugaacaauacugaagguga

SEQ ID NO: 7489 - RNA, 19 nt, Artificial Sequence
  Synthetic
uguacgaggccauggaaca

SEQ ID NO: 7490 - RNA, 19 nt, Artificial Sequence
  Synthetic
acccagagggccaggauuu

SEQ ID NO: 7491 - RNA, 19 nt, Artificial Sequence
  Synthetic
ucacugagcucaucaccaa

SEQ ID NO: 7492 - RNA, 19 nt, Artificial Sequence
  Synthetic
aagagugguacuuuggaaa

SEQ ID NO: 7493 - RNA, 19 nt, Artificial Sequence
  Synthetic
ccaucuacaucgugaccga

SEQ ID NO: 7494 - RNA, 19 nt, Artificial Sequence
  Synthetic
agcacuacauggaggugaa

SEQ ID NO: 7495 - RNA, 19 nt, Artificial Sequence
  Synthetic
gaauaaacgggaaguguug

SEQ ID NO: 7496 - RNA, 19 nt, Artificial Sequence
  Synthetic
ggaggaugcuggccuggaa

SEQ ID NO: 7497 - RNA, 19 nt, Artificial Sequence
  Synthetic
ucaugaagcugcugcggca

SEQ ID NO: 7498 - RNA, 19 nt, Artificial Sequence
  Synthetic
uguaugagcguaugagcau

SEQ ID NO: 7499 - RNA, 19 nt, Artificial Sequence
  Synthetic
cagcgaaaguugugggaaa

SEQ ID NO: 7500 - RNA, 19 nt, Artificial Sequence
  Synthetic
cuucaaauauggagggaaa

SEQ ID NO: 7501 - RNA, 19 nt, Artificial Sequence
  Synthetic
cuaaagaagugaagaucaa

SEQ ID NO: 7502 - RNA, 19 nt, Artificial Sequence
  Synthetic
ugaagaacaugaagagaua

SEQ ID NO: 7503 - RNA, 19 nt, Artificial Sequence
  Synthetic
cagcaugaguguaagaaua

SEQ ID NO: 7504 - RNA, 19 nt, Artificial Sequence
  Synthetic
ggcaaagggaguagaaaua

SEQ ID NO: 7505 - RNA, 19 nt, Artificial Sequence
  Synthetic
uggaagaugugaagguaaa

SEQ ID NO: 7506 - RNA, 19 nt, Artificial Sequence
  Synthetic
ggaaagacuacaagagaau

SEQ ID NO: 7507 - RNA, 19 nt, Artificial Sequence
  Synthetic
gcucaauacuucuggaauu

SEQ ID NO: 7508 - RNA, 19 nt, Artificial Sequence
  Synthetic
gagaaaugauaaagcacua

SEQ ID NO: 7509 - RNA, 19 nt, Artificial Sequence
  Synthetic
caacgaugcuggagaguau

SEQ ID NO: 7510 - RNA, 19 nt, Artificial Sequence
  Synthetic
gaacaagagugcacugaua

SEQ ID NO: 7511 - RNA, 19 nt, Artificial Sequence
  Synthetic
ggaaagacaugccaagaua

SEQ ID NO: 7512 - RNA, 19 nt, Artificial Sequence
  Synthetic
gugcauagccaaugggauu

SEQ ID NO: 7513 - RNA, 19 nt, Artificial Sequence
  Synthetic
ggacaacagcaaaggaaau

SEQ ID NO: 7514 - RNA, 19 nt, Artificial Sequence
  Synthetic
cugagagaguugugguaaa

SEQ ID NO: 7515 - RNA, 19 nt, Artificial Sequence
  Synthetic
uauuaaugcugguggcaaa

SEQ ID NO: 7516 - RNA, 19 nt, Artificial Sequence
  Synthetic
gcaaacaagccaaggauau

SEQ ID NO: 7517 - RNA, 19 nt, Artificial Sequence
  Synthetic
ccacagaucccaagaaauu

SEQ ID NO: 7518 - RNA, 19 nt, Artificial Sequence
  Synthetic
ggaagaaacucgaaaucau

SEQ ID NO: 7519 - RNA, 19 nt, Artificial Sequence
  Synthetic
augcaaagcaaguggaaau

SEQ ID NO: 7520 - RNA, 19 nt, Artificial Sequence
  Synthetic
cuguaaagcuacugguauu

SEQ ID NO: 7521 - RNA, 19 nt, Artificial Sequence
  Synthetic
gagaugaugauaaggaaua

SEQ ID NO: 7522 - RNA, 19 nt, Artificial Sequence
  Synthetic
gcccauagcuaguggugaa

SEQ ID NO: 7523 - RNA, 19 nt, Artificial Sequence
  Synthetic
ccaucaaacugaacacaaa

SEQ ID NO: 7524 - RNA, 19 nt, Artificial Sequence
  Synthetic
gcccauaugccuuggaaua

SEQ ID NO: 7525 - RNA, 19 nt, Artificial Sequence
  Synthetic
gggaguggauauugaaauu

SEQ ID NO: 7526 - RNA, 19 nt, Artificial Sequence
  Synthetic
gugaacgaguguagacaaa

SEQ ID NO: 7527 - RNA, 19 nt, Artificial Sequence
  Synthetic
guauguauguagagcuaua

SEQ ID NO: 7528 - RNA, 19 nt, Artificial Sequence
  Synthetic
gggcugaguugucaagaua

SEQ ID NO: 7529 - RNA, 19 nt, Artificial Sequence
  Synthetic
caacaaagacccacagaua

SEQ ID NO: 7530 - RNA, 19 nt, Artificial Sequence
  Synthetic
cagcagaaaucuuuggaua

SEQ ID NO: 7531 - RNA, 19 nt, Artificial Sequence
  Synthetic
gcuuauagaacuugaacua

SEQ ID NO: 7532 - RNA, 19 nt, Artificial Sequence
  Synthetic
guacagagacugagcaaau

SEQ ID NO: 7533 - RNA, 19 nt, Artificial Sequence
  Synthetic
ccucagaaacccaaaguua

SEQ ID NO: 7534 - RNA, 19 nt, Artificial Sequence
  Synthetic
gcagaaaucuuuggauaua

SEQ ID NO: 7535 - RNA, 19 nt, Artificial Sequence
  Synthetic
aaauaaagaggacggguua

SEQ ID NO: 7536 - RNA, 19 nt, Artificial Sequence
  Synthetic
aaagagaaguaucagguua

SEQ ID NO: 7537 - RNA, 19 nt, Artificial Sequence
  Synthetic
caucuuaagugcaaacuaa

SEQ ID NO: 7538 - RNA, 19 nt, Artificial Sequence
  Synthetic
cagacacacugauggauaa

SEQ ID NO: 7539 - RNA, 19 nt, Artificial Sequence
  Synthetic
cauaagaaguugggaauca

SEQ ID NO: 7540 - RNA, 19 nt, Artificial Sequence
  Synthetic
agacuaaacuggagcaacu

SEQ ID NO: 7541 - RNA, 19 nt, Artificial Sequence
  Synthetic
gcuuugauaccaagaauua

SEQ ID NO: 7542 - RNA, 19 nt, Artificial Sequence
  Synthetic
aggacggguuacagaauaa

SEQ ID NO: 7543 - RNA, 19 nt, Artificial Sequence
  Synthetic
aaaccaaaucaguggcuua

SEQ ID NO: 7544 - RNA, 19 nt, Artificial Sequence
  Synthetic
uauuauaguugcugccaua

SEQ ID NO: 7545 - RNA, 19 nt, Artificial Sequence
  Synthetic
acucauaagaaguugggaa

SEQ ID NO: 7546 - RNA, 19 nt, Artificial Sequence
  Synthetic
acuaaggacuugacagaca

SEQ ID NO: 7547 - RNA, 19 nt, Artificial Sequence
  Synthetic
gcauuuaagaugacaguga

SEQ ID NO: 7548 - RNA, 19 nt, Artificial Sequence
  Synthetic
ccacagagccuuaugcuau

SEQ ID NO: 7549 - RNA, 19 nt, Artificial Sequence
  Synthetic
gauuggagucugaacauaa

SEQ ID NO: 7550 - RNA, 19 nt, Artificial Sequence
  Synthetic
agacuaaggacuugacaga

SEQ ID NO: 7551 - RNA, 19 nt, Artificial Sequence
  Synthetic
cagaauugcuaaagaaaug

SEQ ID NO: 7552 - RNA, 19 nt, Artificial Sequence
  Synthetic
gguuuguacuugaugauau

SEQ ID NO: 7553 - RNA, 19 nt, Artificial Sequence
  Synthetic
ggaguaugcaccaaauaaa

SEQ ID NO: 7554 - RNA, 19 nt, Artificial Sequence
  Synthetic
gugcugauuuguuuggaua

SEQ ID NO: 7555 - RNA, 19 nt, Artificial Sequence
  Synthetic
cauuagugugcuuaggaaa

SEQ ID NO: 7556 - RNA, 19 nt, Artificial Sequence
  Synthetic
ccaacuacuaugaccaaua

SEQ ID NO: 7557 - RNA, 19 nt, Artificial Sequence
  Synthetic
guacacagucuaugaguca

SEQ ID NO: 7558 - RNA, 19 nt, Artificial Sequence
  Synthetic
ggaucuugguguuauuuaa

SEQ ID NO: 7559 - RNA, 19 nt, Artificial Sequence
  Synthetic
gcacaauuguuaauggaaa

SEQ ID NO: 7560 - RNA, 19 nt, Artificial Sequence
  Synthetic
caauguaacugcagaagau

SEQ ID NO: 7561 - RNA, 19 nt, Artificial Sequence
  Synthetic
gaagauggguuggaagaaa

SEQ ID NO: 7562 - RNA, 19 nt, Artificial Sequence
  Synthetic
gagaagauggguuggaaga

SEQ ID NO: 7563 - RNA, 19 nt, Artificial Sequence
  Synthetic
cuaaugaacagguaacaua

SEQ ID NO: 7564 - RNA, 19 nt, Artificial Sequence
  Synthetic
cgagagcgguuuacugaaa

SEQ ID NO: 7565 - RNA, 19 nt, Artificial Sequence
  Synthetic
ucagaaauguguaugguuu

SEQ ID NO: 7566 - RNA, 19 nt, Artificial Sequence
  Synthetic
gcgugaaugagguggauua

SEQ ID NO: 7567 - RNA, 19 nt, Artificial Sequence
  Synthetic
gggagaaugaggucagaaa

SEQ ID NO: 7568 - RNA, 19 nt, Artificial Sequence
  Synthetic
cuaccaagcuuuugacauu

SEQ ID NO: 7569 - RNA, 19 nt, Artificial Sequence
  Synthetic
ggcacaagaugcacaauua

SEQ ID NO: 7570 - RNA, 19 nt, Artificial Sequence
  Synthetic
ggccaagaauugagcauga

SEQ ID NO: 7571 - RNA, 19 nt, Artificial Sequence
  Synthetic
uggcaaagauucauacuau

SEQ ID NO: 7572 - RNA, 19 nt, Artificial Sequence
  Synthetic
gguuaaucgccuuagaaau

SEQ ID NO: 7573 - RNA, 19 nt, Artificial Sequence
  Synthetic
ccaccaggcuugggaggaa

SEQ ID NO: 7574 - RNA, 19 nt, Artificial Sequence
  Synthetic
ccuuagaaauggcaaagau

SEQ ID NO: 7575 - RNA, 19 nt, Artificial Sequence
  Synthetic
gagaaugaggucagaaacu

SEQ ID NO: 7576 - RNA, 19 nt, Artificial Sequence
  Synthetic
uagaaauggcaaagauuca

SEQ ID NO: 7577 - RNA, 19 nt, Artificial Sequence
  Synthetic
uugugaagaacgagaucaa

SEQ ID NO: 7578 - RNA, 19 nt, Artificial Sequence
  Synthetic
gcaaaggcucuacgugcaa

SEQ ID NO: 7579 - RNA, 19 nt, Artificial Sequence
  Synthetic
agguuaaucgccuuagaaa

SEQ ID NO: 7580 - RNA, 19 nt, Artificial Sequence
  Synthetic
cuuagaaauggcaaagauu

SEQ ID NO: 7581 - RNA, 19 nt, Artificial Sequence
  Synthetic
ggcaggaucccaucagaaa

SEQ ID NO: 7582 - RNA, 19 nt, Artificial Sequence
  Synthetic
ccugcuauguggaggagga

SEQ ID NO: 7583 - RNA, 19 nt, Artificial Sequence
  Synthetic
ccaacaagcugguggccug

SEQ ID NO: 7584 - RNA, 19 nt, Artificial Sequence
  Synthetic
acuacuaccugcaggcaca

SEQ ID NO: 7585 - RNA, 19 nt, Artificial Sequence
  Synthetic
gaauugagcaugacaucuu

SEQ ID NO: 7586 - RNA, 19 nt, Artificial Sequence
  Synthetic
caaaccagauccaaucaaa

SEQ ID NO: 7587 - RNA, 19 nt, Artificial Sequence
  Synthetic
gggcaggaucccaucagaa

SEQ ID NO: 7588 - RNA, 19 nt, Artificial Sequence
  Synthetic
gcauuggaaacccgagcaa

SEQ ID NO: 7589 - RNA, 19 nt, Artificial Sequence
  Synthetic
gcacaagaugcacaauuau

SEQ ID NO: 7590 - RNA, 19 nt, Artificial Sequence
  Synthetic
acaaugaccugcucugcaa

SEQ ID NO: 7591 - RNA, 19 nt, Artificial Sequence
  Synthetic
guuaaucgccuuagaaaug

SEQ ID NO: 7592 - RNA, 19 nt, Artificial Sequence
  Synthetic
ucccuaagguagagguguu

SEQ ID NO: 7593 - RNA, 19 nt, Artificial Sequence
  Synthetic
ugguggaccgggagaauga

SEQ ID NO: 7594 - RNA, 19 nt, Artificial Sequence
  Synthetic
gcacaauuauuucacgcuu

SEQ ID NO: 7595 - RNA, 19 nt, Artificial Sequence
  Synthetic
ucgccuuagaaauggcaaa

SEQ ID NO: 7596 - RNA, 19 nt, Artificial Sequence
  Synthetic
gguauuaauucuuggauga

SEQ ID NO: 7597 - RNA, 19 nt, Artificial Sequence
  Synthetic
cgaaaucacuggaagaaaa

SEQ ID NO: 7598 - RNA, 19 nt, Artificial Sequence
  Synthetic
gaaacaaaguccaacauau

SEQ ID NO: 7599 - RNA, 19 nt, Artificial Sequence
  Synthetic
ccaagaaacuccuggaacu

SEQ ID NO: 7600 - RNA, 19 nt, Artificial Sequence
  Synthetic
agacagauuaugagggaca

SEQ ID NO: 7601 - RNA, 19 nt, Artificial Sequence
  Synthetic
ccaucuaaguugauaucua

SEQ ID NO: 7602 - RNA, 19 nt, Artificial Sequence
  Synthetic
cgacaagcaaagaagauuu

SEQ ID NO: 7603 - RNA, 19 nt, Artificial Sequence
  Synthetic
gaucaagggugaaaaggaa

SEQ ID NO: 7604 - RNA, 19 nt, Artificial Sequence
  Synthetic
cagagaugcuggcgucaaa

SEQ ID NO: 7605 - RNA, 19 nt, Artificial Sequence
  Synthetic
ugccgaaaguggaaacaaa

SEQ ID NO: 7606 - RNA, 19 nt, Artificial Sequence
  Synthetic
gaucauuguugcaggagga

SEQ ID NO: 7607 - RNA, 19 nt, Artificial Sequence
  Synthetic
gagaauauuacgaaggcuu

SEQ ID NO: 7608 - RNA, 19 nt, Artificial Sequence
  Synthetic
ggagaaaucguguuuuaaa

SEQ ID NO: 7609 - RNA, 19 nt, Artificial Sequence
  Synthetic
gcauugacagugaggagua

SEQ ID NO: 7610 - RNA, 19 nt, Artificial Sequence
  Synthetic
gccaagaauccuaucauaa

SEQ ID NO: 7611 - RNA, 19 nt, Artificial Sequence
  Synthetic
cgucaaaguuagcaaguac

SEQ ID NO: 7612 - RNA, 19 nt, Artificial Sequence
  Synthetic
accaguaguuugagucaua

SEQ ID NO: 7613 - RNA, 19 nt, Artificial Sequence
  Synthetic
gauccuaggaagagagaac

SEQ ID NO: 7614 - RNA, 19 nt, Artificial Sequence
  Synthetic
ccaaugcacaagugaagaa

SEQ ID NO: 7615 - RNA, 19 nt, Artificial Sequence
  Synthetic
gaagucgaaaggugagaaa

SEQ ID NO: 7616 - RNA, 19 nt, Artificial Sequence
  Synthetic
ggagagaccaguaguuuga

SEQ ID NO: 7617 - RNA, 19 nt, Artificial Sequence
  Synthetic
gcacaagugaagaaggcca

SEQ ID NO: 7618 - RNA, 19 nt, Artificial Sequence
  Synthetic
gcacauaaauucgauggaa

SEQ ID NO: 7619 - RNA, 19 nt, Artificial Sequence
  Synthetic
ggaaacaaaguccaacaua

SEQ ID NO: 7620 - RNA, 19 nt, Artificial Sequence
  Synthetic
acauauuacugaugccaca

SEQ ID NO: 7621 - RNA, 19 nt, Artificial Sequence
  Synthetic
cauugugaaaggagagaca

SEQ ID NO: 7622 - RNA, 19 nt, Artificial Sequence
  Synthetic
cuaaaugguuugcaugaga

SEQ ID NO: 7623 - RNA, 19 nt, Artificial Sequence
  Synthetic
gagagcagccugucaagaa

SEQ ID NO: 7624 - RNA, 19 nt, Artificial Sequence
  Synthetic
gugaagaaggccacuguuu

SEQ ID NO: 7625 - RNA, 19 nt, Artificial Sequence
  Synthetic
ccaagaauccuaucauaau

SEQ ID NO: 7626 - RNA, 19 nt, Artificial Sequence
  Synthetic
acgaagaagucuauggaaa

SEQ ID NO: 7627 - RNA, 19 nt, Artificial Sequence
  Synthetic
acuuacagcuugagggaaa

SEQ ID NO: 7628 - RNA, 19 nt, Artificial Sequence
  Synthetic
uaagaaacgacuagaguua

SEQ ID NO: 7629 - RNA, 19 nt, Artificial Sequence
  Synthetic
gggaagaaacucagacuuu

SEQ ID NO: 7630 - RNA, 19 nt, Artificial Sequence
  Synthetic
agaagcagauagaagguaa

SEQ ID NO: 7631 - RNA, 19 nt, Artificial Sequence
  Synthetic
cuaaauggguguaguugua

SEQ ID NO: 7632 - RNA, 19 nt, Artificial Sequence
  Synthetic
gagaagagggacucauaua

SEQ ID NO: 7633 - RNA, 19 nt, Artificial Sequence
  Synthetic
guauagagcugcuucaauu

SEQ ID NO: 7634 - RNA, 19 nt, Artificial Sequence
  Synthetic
ugacuaacuugcugcuaaa

SEQ ID NO: 7635 - RNA, 19 nt, Artificial Sequence
  Synthetic
caacagauuugguggugau

SEQ ID NO: 7636 - RNA, 19 nt, Artificial Sequence
  Synthetic
cugagcaagugguagauaa

SEQ ID NO: 7637 - RNA, 19 nt, Artificial Sequence
  Synthetic
gcauuaaauagaagguuga

SEQ ID NO: 7638 - RNA, 19 nt, Artificial Sequence
  Synthetic
gugaacacauuuacacaua

SEQ ID NO: 7639 - RNA, 19 nt, Artificial Sequence
  Synthetic
gcagauagaagguaauuuu

SEQ ID NO: 7640 - RNA, 19 nt, Artificial Sequence
  Synthetic
aagaauacgaagaagucua

SEQ ID NO: 7641 - RNA, 19 nt, Artificial Sequence
  Synthetic
auaagaugguggugagcau

SEQ ID NO: 7642 - RNA, 19 nt, Artificial Sequence
  Synthetic
ugauauauccacugguauu

SEQ ID NO: 7643 - RNA, 19 nt, Artificial Sequence
  Synthetic
gcuccaagcagcugggcau

SEQ ID NO: 7644 - RNA, 19 nt, Artificial Sequence
  Synthetic
cgaagaagucuauggaaac

SEQ ID NO: 7645 - RNA, 19 nt, Artificial Sequence
  Synthetic
gaggauugcuugagcucau

SEQ ID NO: 7646 - RNA, 19 nt, Artificial Sequence
  Synthetic
gucacuaguuugagaugaa

SEQ ID NO: 7647 - RNA, 19 nt, Artificial Sequence
  Synthetic
gaagagggacucauauaaa

SEQ ID NO: 7648 - RNA, 19 nt, Artificial Sequence
  Synthetic
gcaucaucuugguuauaua

SEQ ID NO: 7649 - RNA, 19 nt, Artificial Sequence
  Synthetic
ucuaaacagagaaggcuua

SEQ ID NO: 7650 - RNA, 19 nt, Artificial Sequence
  Synthetic
aaacagagaaggcuuauaa

SEQ ID NO: 7651 - RNA, 19 nt, Artificial Sequence
  Synthetic
cugacuaacuugcugcuaa

SEQ ID NO: 7652 - RNA, 19 nt, Artificial Sequence
  Synthetic
gcugauauauccacuggua

SEQ ID NO: 7653 - RNA, 19 nt, Artificial Sequence
  Synthetic
gaagaagucuauggaaaca

SEQ ID NO: 7654 - RNA, 19 nt, Artificial Sequence
  Synthetic
cuuugauucuuuagaguca

SEQ ID NO: 7655 - RNA, 19 nt, Artificial Sequence
  Synthetic
ucagauaguguguuguuua

SEQ ID NO: 7656 - RNA, 19 nt, Artificial Sequence
  Synthetic
caaucaagcuuuagaagaa

SEQ ID NO: 7657 - RNA, 19 nt, Artificial Sequence
  Synthetic
gcagaaaggagaagcaaau

SEQ ID NO: 7658 - RNA, 19 nt, Artificial Sequence
  Synthetic
ccagauggguguuggcaaa

SEQ ID NO: 7659 - RNA, 19 nt, Artificial Sequence
  Synthetic
uggcaaagaaucagauauu

SEQ ID NO: 7660 - RNA, 19 nt, Artificial Sequence
  Synthetic
gaaaggagaagcaaauaua

SEQ ID NO: 7661 - RNA, 19 nt, Artificial Sequence
  Synthetic
guugacaaaugcaggauau

SEQ ID NO: 7662 - RNA, 19 nt, Artificial Sequence
  Synthetic
ugaagaaggacaacaauuu

SEQ ID NO: 7663 - RNA, 19 nt, Artificial Sequence
  Synthetic
ugaugaagcuauggaacua

SEQ ID NO: 7664 - RNA, 19 nt, Artificial Sequence
  Synthetic
caggcaagauggucagaga

SEQ ID NO: 7665 - RNA, 19 nt, Artificial Sequence
  Synthetic
ggaacuaauugucaaacuu

SEQ ID NO: 7666 - RNA, 19 nt, Artificial Sequence
  Synthetic
ggaagacaguuuaucagaa

SEQ ID NO: 7667 - RNA, 19 nt, Artificial Sequence
  Synthetic
aaacaugguggcuguaaua

SEQ ID NO: 7668 - RNA, 19 nt, Artificial Sequence
  Synthetic
cggacuagcuuaagaccaa

SEQ ID NO: 7669 - RNA, 19 nt, Artificial Sequence
  Synthetic
agauggacaugguggagaa

SEQ ID NO: 7670 - RNA, 19 nt, Artificial Sequence
  Synthetic
gcuuaagaccaaugcagua

SEQ ID NO: 7671 - RNA, 19 nt, Artificial Sequence
  Synthetic
aaacaaacacggugaaagu

SEQ ID NO: 7672 - RNA, 19 nt, Artificial Sequence
  Synthetic
ggcaauagcuggcauguuu

SEQ ID NO: 7673 - RNA, 19 nt, Artificial Sequence
  Synthetic
gagcaagucuguaaacuga

SEQ ID NO: 7674 - RNA, 19 nt, Artificial Sequence
  Synthetic
ggaucaaggacgaguguuc

SEQ ID NO: 7675 - RNA, 19 nt, Artificial Sequence
  Synthetic
agaccaaugcaguagcuua

SEQ ID NO: 7676 - RNA, 19 nt, Artificial Sequence
  Synthetic
aggcugagcaagucuguaa

SEQ ID NO: 7677 - RNA, 19 nt, Artificial Sequence
  Synthetic
cuucauugcuucuguuauu

SEQ ID NO: 7678 - RNA, 19 nt, Artificial Sequence
  Synthetic
gaggaaagguuuugucauc

SEQ ID NO: 7679 - RNA, 19 nt, Artificial Sequence
  Synthetic
ggagaucaucccagccuua

SEQ ID NO: 7680 - RNA, 19 nt, Artificial Sequence
  Synthetic
aggacugggucguguucua

SEQ ID NO: 7681 - RNA, 19 nt, Artificial Sequence
  Synthetic
cccugaacaucaugaggaa

SEQ ID NO: 7682 - RNA, 19 nt, Artificial Sequence
  Synthetic
ccgauuuacaccuugauaa

SEQ ID NO: 7683 - RNA, 19 nt, Artificial Sequence
  Synthetic
gaccaaugcaguagcuuau

SEQ ID NO: 7684 - RNA, 19 nt, Artificial Sequence
  Synthetic
guuguaguaaagagacaua

SEQ ID NO: 7685 - RNA, 19 nt, Artificial Sequence
  Synthetic
gaaacguagcagaggauuc

SEQ ID NO: 7686 - RNA, 19 nt, Artificial Sequence
  Synthetic
aaucaagcguauuccguuu

SEQ ID NO: 7687 - RNA, 19 nt, Artificial Sequence
  Synthetic
gaguguucgugaaagugaa

SEQ ID NO: 7688 - RNA, 19 nt, Artificial Sequence
  Synthetic
gcaaauucuuguuucuuca

SEQ ID NO: 7689 - RNA, 19 nt, Artificial Sequence
  Synthetic
aauacaugcugaacucaua

SEQ ID NO: 7690 - RNA, 19 nt, Artificial Sequence
  Synthetic
cgaaaguggguauccgaaa

SEQ ID NO: 7691 - RNA, 19 nt, Artificial Sequence
  Synthetic
gggccaacuuccuguauga

SEQ ID NO: 7692 - RNA, 19 nt, Artificial Sequence
  Synthetic
ggugaaggcugcagcugau

SEQ ID NO: 7693 - RNA, 19 nt, Artificial Sequence
  Synthetic
ucaguguguuggagaggua

SEQ ID NO: 7694 - RNA, 19 nt, Artificial Sequence
  Synthetic
ccucaagccucccguggaa

SEQ ID NO: 7695 - RNA, 19 nt, Artificial Sequence
  Synthetic
ucacaggcuuugaaaccaa

SEQ ID NO: 7696 - RNA, 19 nt, Artificial Sequence
  Synthetic
cggcuugugcccagaauuu

SEQ ID NO: 7697 - RNA, 19 nt, Artificial Sequence
  Synthetic
gaaaguggguauccgaaaa

SEQ ID NO: 7698 - RNA, 19 nt, Artificial Sequence
  Synthetic
gagacuguguccugcagaa

SEQ ID NO: 7699 - RNA, 19 nt, Artificial Sequence
  Synthetic
cagggaagcgguuaacuua

SEQ ID NO: 7700 - RNA, 19 nt, Artificial Sequence
  Synthetic
gguguggguucgagaccuu

SEQ ID NO: 7701 - RNA, 19 nt, Artificial Sequence
  Synthetic
cagaguucacagaccauua

SEQ ID NO: 7702 - RNA, 19 nt, Artificial Sequence
  Synthetic
uggccgagauggcuaagaa

SEQ ID NO: 7703 - RNA, 19 nt, Artificial Sequence
  Synthetic
acccugagcaaaugacuua

SEQ ID NO: 7704 - RNA, 19 nt, Artificial Sequence
  Synthetic
ccagggaagcgguuaacuu

SEQ ID NO: 7705 - RNA, 19 nt, Artificial Sequence
  Synthetic
gugcagaccuuauguacag

SEQ ID NO: 7706 - RNA, 19 nt, Artificial Sequence
  Synthetic
gcuaagaguuucuguaaua

SEQ ID NO: 7707 - RNA, 19 nt, Artificial Sequence
  Synthetic
gcuaugaucuugagaacaa

SEQ ID NO: 7708 - RNA, 19 nt, Artificial Sequence
  Synthetic
aagaaaugauccuggaaua

SEQ ID NO: 7709 - RNA, 19 nt, Artificial Sequence
  Synthetic
cgaauaaacuuaccagaua

SEQ ID NO: 7710 - RNA, 19 nt, Artificial Sequence
  Synthetic
gauaaaucuuccagggcaa

SEQ ID NO: 7711 - RNA, 19 nt, Artificial Sequence
  Synthetic
gaacacgugucaagagaaa

SEQ ID NO: 7712 - RNA, 19 nt, Artificial Sequence
  Synthetic
cgauagaucuggugacuuu

SEQ ID NO: 7713 - RNA, 19 nt, Artificial Sequence
  Synthetic
cgacuaaagaagauacuaa

SEQ ID NO: 7714 - RNA, 19 nt, Artificial Sequence
  Synthetic
cuugaagacuggagaaaga

SEQ ID NO: 7715 - RNA, 19 nt, Artificial Sequence
  Synthetic
caucauccaucaagaaaua

SEQ ID NO: 7716 - RNA, 19 nt, Artificial Sequence
  Synthetic
gaacaacaggugugggcaa

SEQ ID NO: 7717 - RNA, 19 nt, Artificial Sequence
  Synthetic
ugagagaugugguugguua

SEQ ID NO: 7718 - RNA, 19 nt, Artificial Sequence
  Synthetic
aguuugagcugacgaauaa

SEQ ID NO: 7719 - RNA, 19 nt, Artificial Sequence
  Synthetic
ggaaaagccugcagaauga

SEQ ID NO: 7720 - RNA, 19 nt, Artificial Sequence
  Synthetic
ugacaaaggccaugaaagu

SEQ ID NO: 7721 - RNA, 19 nt, Artificial Sequence
  Synthetic
agagacaccuggagaauuu

SEQ ID NO: 7722 - RNA, 19 nt, Artificial Sequence
  Synthetic
gcuacaaaugggugcuaaa

SEQ ID NO: 7723 - RNA, 19 nt, Artificial Sequence
  Synthetic
gggacugcauuuugugaua

SEQ ID NO: 7724 - RNA, 19 nt, Artificial Sequence
  Synthetic
gaguuugagcugacgaaua

SEQ ID NO: 7725 - RNA, 19 nt, Artificial Sequence
  Synthetic
ccaccaacagcaaggauua

SEQ ID NO: 7726 - RNA, 19 nt, Artificial Sequence
  Synthetic
ugauagagcccaacgggaa

SEQ ID NO: 7727 - RNA, 19 nt, Artificial Sequence
  Synthetic
gaaaccagacuuaagaaua

SEQ ID NO: 7728 - RNA, 19 nt, Artificial Sequence
  Synthetic
aagagaaaccuaagaauga

SEQ ID NO: 7729 - RNA, 19 nt, Artificial Sequence
  Synthetic
ggaauacaguacauaacaa

SEQ ID NO: 7730 - RNA, 19 nt, Artificial Sequence
  Synthetic
gaacuaugcuauaccagaa

SEQ ID NO: 7731 - RNA, 19 nt, Artificial Sequence
  Synthetic
ccaaaggaaaggaagaaaa

SEQ ID NO: 7732 - RNA, 19 nt, Artificial Sequence
  Synthetic
ugauagagcagcugaguca

SEQ ID NO: 7733 - RNA, 19 nt, Artificial Sequence
  Synthetic
gauagagcccaacgggaaa

SEQ ID NO: 7734 - RNA, 19 nt, Artificial Sequence
  Synthetic
uggaacacgucgagaaguu

SEQ ID NO: 7735 - RNA, 19 nt, Artificial Sequence
  Synthetic
gcuaggaggugaaucagaa

SEQ ID NO: 7736 - RNA, 19 nt, Artificial Sequence
  Synthetic
cguuaagaauggagagaaa

SEQ ID NO: 7737 - RNA, 19 nt, Artificial Sequence
  Synthetic
gagaauagcugcagaagaa

SEQ ID NO: 7738 - RNA, 19 nt, Artificial Sequence
  Synthetic
agaaagaacacgagagaau

SEQ ID NO: 7739 - RNA, 19 nt, Artificial Sequence
  Synthetic
gcaaagggucauuaagaaa

SEQ ID NO: 7740 - RNA, 19 nt, Artificial Sequence
  Synthetic
aauaaaagcucaagaggaa

SEQ ID NO: 7741 - RNA, 19 nt, Artificial Sequence
  Synthetic
gcucgugaacaaagagaaa

SEQ ID NO: 7742 - RNA, 19 nt, Artificial Sequence
  Synthetic
ggaagcaagaugugguuaa

SEQ ID NO: 7743 - RNA, 19 nt, Artificial Sequence
  Synthetic
ccagaaggaugaagcacaa

SEQ ID NO: 7744 - RNA, 19 nt, Artificial Sequence
  Synthetic
ccgccuugcucgugaacaa

SEQ ID NO: 7745 - RNA, 19 nt, Artificial Sequence
  Synthetic
gcuccaaagaaaucagaaa

SEQ ID NO: 7746 - RNA, 19 nt, Artificial Sequence
  Synthetic
gagagacgcuccaaagaaa

SEQ ID NO: 7747 - RNA, 19 nt, Artificial Sequence
  Synthetic
gcgaaaagagaaagaagaa

SEQ ID NO: 7748 - RNA, 19 nt, Artificial Sequence
  Synthetic
gagagaagcucaucuuuaa

SEQ ID NO: 7749 - RNA, 19 nt, Artificial Sequence
  Synthetic
uuacaagaacgguuagaaa

SEQ ID NO: 7750 - RNA, 19 nt, Artificial Sequence
  Synthetic
uggaggaaagacagagaaa

SEQ ID NO: 7751 - RNA, 19 nt, Artificial Sequence
  Synthetic
cuacauucgucuacugaua

SEQ ID NO: 7752 - RNA, 19 nt, Artificial Sequence
  Synthetic
gggaagaaaugcagcaaag

SEQ ID NO: 7753 - RNA, 19 nt, Artificial Sequence
  Synthetic
aaucagaaauggacaaaca

SEQ ID NO: 7754 - RNA, 19 nt, Artificial Sequence
  Synthetic
gaaaggaagccacguguua

SEQ ID NO: 7755 - RNA, 19 nt, Artificial Sequence
  Synthetic
gaaauuaugaagcggacaa

SEQ ID NO: 7756 - RNA, 19 nt, Artificial Sequence
  Synthetic
caagaaagacagaugugaa

SEQ ID NO: 7757 - RNA, 19 nt, Artificial Sequence
  Synthetic
gagcaaaacugccaauaaa

SEQ ID NO: 7758 - RNA, 19 nt, Artificial Sequence
  Synthetic
gaaagaagaacaacggaga

SEQ ID NO: 7759 - RNA, 19 nt, Artificial Sequence
  Synthetic
ggagaaaaggagacagcaa

SEQ ID NO: 7760 - RNA, 19 nt, Artificial Sequence
  Synthetic
uggcgaauucugagagcaa

SEQ ID NO: 7761 - RNA, 19 nt, Artificial Sequence
  Synthetic
uagaagagauaguaaccua

SEQ ID NO: 7762 - RNA, 19 nt, Artificial Sequence
  Synthetic
aaagaacacgagagaauua

SEQ ID NO: 7763 - RNA, 19 nt, Artificial Sequence
  Synthetic
ggagagaagcucaucuuua

SEQ ID NO: 7764 - RNA, 19 nt, Artificial Sequence
  Synthetic
caagaaagaacacgagaga

SEQ ID NO: 7765 - RNA, 19 nt, Artificial Sequence
  Synthetic
aagaacaagccgaaaggaa

SEQ ID NO: 7766 - RNA, 19 nt, Artificial Sequence
  Synthetic
gggcagugaagaagaaauu

SEQ ID NO: 7767 - RNA, 19 nt, Artificial Sequence
  Synthetic
aggaggaggaggagggcua

SEQ ID NO: 7768 - RNA, 19 nt, Artificial Sequence
  Synthetic
ugaaugagguggugauuga

SEQ ID NO: 7769 - RNA, 19 nt, Artificial Sequence
  Synthetic
gaugagaccuggaguuaca

SEQ ID NO: 7770 - RNA, 19 nt, Artificial Sequence
  Synthetic
gcgaugagaccuggaguua

SEQ ID NO: 7771 - RNA, 19 nt, Artificial Sequence
  Synthetic
ccaggaagguaguuuaaau

SEQ ID NO: 7772 - RNA, 19 nt, Artificial Sequence
  Synthetic
caauggaaauggaacaaga

SEQ ID NO: 7773 - RNA, 19 nt, Artificial Sequence
  Synthetic
ugacauuuccaaucagaua

SEQ ID NO: 7774 - RNA, 19 nt, Artificial Sequence
  Synthetic
gcaacuguaaugagaauuu

SEQ ID NO: 7775 - RNA, 19 nt, Artificial Sequence
  Synthetic
gaacugaagagcuguguuu

SEQ ID NO: 7776 - RNA, 19 nt, Artificial Sequence
  Synthetic
ggaagcaggccaugcagua

SEQ ID NO: 7777 - RNA, 19 nt, Artificial Sequence
  Synthetic
aggaagaggucgaggcgcu

SEQ ID NO: 7778 - RNA, 19 nt, Artificial Sequence
  Synthetic
gcaaaucagucgguugaaa

SEQ ID NO: 7779 - RNA, 19 nt, Artificial Sequence
  Synthetic
gagaagauuaugaugacau

SEQ ID NO: 7780 - RNA, 19 nt, Artificial Sequence
  Synthetic
cagucgagcugaagaucau

SEQ ID NO: 7781 - RNA, 19 nt, Artificial Sequence
  Synthetic
ccaaguuacucaggugaua

SEQ ID NO: 7782 - RNA, 19 nt, Artificial Sequence
  Synthetic
ccgcaaaucagucgguuga

SEQ ID NO: 7783 - RNA, 19 nt, Artificial Sequence
  Synthetic
ggacggaagagacaagaga

SEQ ID NO: 7784 - RNA, 19 nt, Artificial Sequence
  Synthetic
ggagacagcaucagcauca

SEQ ID NO: 7785 - RNA, 19 nt, Artificial Sequence
  Synthetic
agaagacggccgugcacaa

SEQ ID NO: 7786 - RNA, 19 nt, Artificial Sequence
  Synthetic
ugaccaugaauaaggaauu

SEQ ID NO: 7787 - RNA, 19 nt, Artificial Sequence
  Synthetic
cugaagugcugauguacau

SEQ ID NO: 7788 - RNA, 19 nt, Artificial Sequence
  Synthetic
cauucagcuuugagaacuu

SEQ ID NO: 7789 - RNA, 19 nt, Artificial Sequence
  Synthetic
gcacuuugcuuccaggaga

SEQ ID NO: 7790 - RNA, 19 nt, Artificial Sequence
  Synthetic
cuaaagaagcgugagaaau

SEQ ID NO: 7791 - RNA, 19 nt, Artificial Sequence
  Synthetic
ggaaugaucuagaaaacuu

SEQ ID NO: 7792 - RNA, 19 nt, Artificial Sequence
  Synthetic
uaaagaagcgugagaaaug

SEQ ID NO: 7793 - RNA, 19 nt, Artificial Sequence
  Synthetic
guaccuuucgagaagauua

SEQ ID NO: 7794 - RNA, 19 nt, Artificial Sequence
  Synthetic
ucgaggaggaggaggagga

SEQ ID NO: 7795 - RNA, 19 nt, Artificial Sequence
  Synthetic
gaguauaagcauaacgaaa

SEQ ID NO: 7796 - RNA, 19 nt, Artificial Sequence
  Synthetic
ucaaagugcaguagaaaua

SEQ ID NO: 7797 - RNA, 19 nt, Artificial Sequence
  Synthetic
aaagagagcuggaaugaaa

SEQ ID NO: 7798 - RNA, 19 nt, Artificial Sequence
  Synthetic
gcacaaaagucaacaaaau

SEQ ID NO: 7799 - RNA, 19 nt, Artificial Sequence
  Synthetic
ggacaaguguuaucgcuua

SEQ ID NO: 7800 - RNA, 19 nt, Artificial Sequence
  Synthetic
gcaaauuguaugcaguaaa

SEQ ID NO: 7801 - RNA, 19 nt, Artificial Sequence
  Synthetic
guacaagagaguaaccaaa

SEQ ID NO: 7802 - RNA, 19 nt, Artificial Sequence
  Synthetic
gggaaaaucugcagcauca

SEQ ID NO: 7803 - RNA, 19 nt, Artificial Sequence
  Synthetic
cauauuaaacugacggauu

SEQ ID NO: 7804 - RNA, 19 nt, Artificial Sequence
  Synthetic
ggaaaguccauuagaaagu

SEQ ID NO: 7805 - RNA, 19 nt, Artificial Sequence
  Synthetic
ggggaaagaucauuauuua

SEQ ID NO: 7806 - RNA, 19 nt, Artificial Sequence
  Synthetic
gauuuagucuguagcacaa

SEQ ID NO: 7807 - RNA, 19 nt, Artificial Sequence
  Synthetic
ccaggaaagugaugaagca

SEQ ID NO: 7808 - RNA, 19 nt, Artificial Sequence
  Synthetic
guucauaucccauggcuau

SEQ ID NO: 7809 - RNA, 19 nt, Artificial Sequence
  Synthetic
agucuagccucguguuaua

SEQ ID NO: 7810 - RNA, 19 nt, Artificial Sequence
  Synthetic
ggagaauaaggaagaaaua

SEQ ID NO: 7811 - RNA, 19 nt, Artificial Sequence
  Synthetic
gaucugaggaggaaagaaa

SEQ ID NO: 7812 - RNA, 19 nt, Artificial Sequence
  Synthetic
agacauagguuggagaaua

SEQ ID NO: 7813 - RNA, 19 nt, Artificial Sequence
  Synthetic
gacauagguuggagaauaa

SEQ ID NO: 7814 - RNA, 19 nt, Artificial Sequence
  Synthetic
agaaaggucuucagaacua

SEQ ID NO: 7815 - RNA, 19 nt, Artificial Sequence
  Synthetic
gaagagacuaauugaggaa

SEQ ID NO: 7816 - RNA, 19 nt, Artificial Sequence
  Synthetic
gcagaaaggucuucagaac

SEQ ID NO: 7817 - RNA, 19 nt, Artificial Sequence
  Synthetic
ccaaagaauguauagagaa

SEQ ID NO: 7818 - RNA, 19 nt, Artificial Sequence
  Synthetic
gagaauugccaaagaaugu

SEQ ID NO: 7819 - RNA, 19 nt, Artificial Sequence
  Synthetic
gccaaagaauguauagaga

SEQ ID NO: 7820 - RNA, 19 nt, Artificial Sequence
  Synthetic
gauuuuagcucgaaagaag

SEQ ID NO: 7821 - RNA, 19 nt, Artificial Sequence
  Synthetic
uauuagagguacugaaguu

SEQ ID NO: 7822 - RNA, 19 nt, Artificial Sequence
  Synthetic
aagaggaauuucuguggaa

SEQ ID NO: 7823 - RNA, 19 nt, Artificial Sequence
  Synthetic
cgaaagaagucaaaacgau

SEQ ID NO: 7824 - RNA, 19 nt, Artificial Sequence
  Synthetic
caacauauucaguggauaa

SEQ ID NO: 7825 - RNA, 19 nt, Artificial Sequence
  Synthetic
cagaagauguugugagaga

SEQ ID NO: 7826 - RNA, 19 nt, Artificial Sequence
  Synthetic
ucaaagagauccucagaaa

SEQ ID NO: 7827 - RNA, 19 nt, Artificial Sequence
  Synthetic
ggaaggaggaggugauaau

SEQ ID NO: 7828 - RNA, 19 nt, Artificial Sequence
  Synthetic
gggaaaauguccugaagaa

SEQ ID NO: 7829 - RNA, 19 nt, Artificial Sequence
  Synthetic
ccaaggagcuuuugcagaa

SEQ ID NO: 7830 - RNA, 19 nt, Artificial Sequence
  Synthetic
caugaaaaguagagucaaa

SEQ ID NO: 7831 - RNA, 19 nt, Artificial Sequence
  Synthetic
ugaccugauuaguggauua

SEQ ID NO: 7832 - RNA, 19 nt, Artificial Sequence
  Synthetic
gugcaaaaggccugaaaua

SEQ ID NO: 7833 - RNA, 19 nt, Artificial Sequence
  Synthetic
ggaagagcguguugugaau

SEQ ID NO: 7834 - RNA, 19 nt, Artificial Sequence
  Synthetic
aguuauugcucaagaugaa

SEQ ID NO: 7835 - RNA, 19 nt, Artificial Sequence
  Synthetic
gaaaauguccugaagaaaa

SEQ ID NO: 7836 - RNA, 19 nt, Artificial Sequence
  Synthetic
gaagaaagcuuuugcugga

SEQ ID NO: 7837 - RNA, 19 nt, Artificial Sequence
  Synthetic
ggacaaggcuacugcagca

SEQ ID NO: 7838 - RNA, 19 nt, Artificial Sequence
  Synthetic
cagcauucauuuuggaaga

SEQ ID NO: 7839 - RNA, 19 nt, Artificial Sequence
  Synthetic
gggaagagcguguugugaa

SEQ ID NO: 7840 - RNA, 19 nt, Artificial Sequence
  Synthetic
ccuaaagcuucuucagauu

SEQ ID NO: 7841 - RNA, 19 nt, Artificial Sequence
  Synthetic
uggcaaaaguggaagguga

SEQ ID NO: 7842 - RNA, 19 nt, Artificial Sequence
  Synthetic
gaagauguugugagagaau

SEQ ID NO: 7843 - RNA, 19 nt, Artificial Sequence
  Synthetic
gaggagaucggaagaggaa

SEQ ID NO: 7844 - RNA, 19 nt, Artificial Sequence
  Synthetic
caagaaaagguuugacuua

SEQ ID NO: 7845 - RNA, 19 nt, Artificial Sequence
  Synthetic
cguccuacucccagaacua

SEQ ID NO: 7846 - RNA, 19 nt, Artificial Sequence
  Synthetic
ccaccuauuccgaaagauu

SEQ ID NO: 7847 - RNA, 19 nt, Artificial Sequence
  Synthetic
gaaacagccaccaguuaaa

SEQ ID NO: 7848 - RNA, 19 nt, Artificial Sequence
  Synthetic
gaucaagauuggaaugacu

SEQ ID NO: 7849 - RNA, 19 nt, Artificial Sequence
  Synthetic
cccagaagauguugugaga

SEQ ID NO: 7850 - RNA, 19 nt, Artificial Sequence
  Synthetic
ugaaagaucaagauuggaa

SEQ ID NO: 7851 - RNA, 19 nt, Artificial Sequence
  Synthetic
cugcacaggugguuccuua

SEQ ID NO: 7852 - RNA, 19 nt, Artificial Sequence
  Synthetic
uaauuugcuugauggguua

SEQ ID NO: 7853 - RNA, 19 nt, Artificial Sequence
  Synthetic
cugaagaaaagcaugaaaa

SEQ ID NO: 7854 - RNA, 19 nt, Artificial Sequence
  Synthetic
ggaccuaacuggcgagcaa

SEQ ID NO: 7855 - RNA, 19 nt, Artificial Sequence
  Synthetic
gagaauuacugcuuaguua

SEQ ID NO: 7856 - RNA, 19 nt, Artificial Sequence
  Synthetic
ggauaauaugacugcgaaa

SEQ ID NO: 7857 - RNA, 19 nt, Artificial Sequence
  Synthetic
guacagaugaggagcaaau

SEQ ID NO: 7858 - RNA, 19 nt, Artificial Sequence
  Synthetic
ugaaagaaacaaagccaua

SEQ ID NO: 7859 - RNA, 19 nt, Artificial Sequence
  Synthetic
ggagaaggcuagaaagguu

SEQ ID NO: 7860 - RNA, 19 nt, Artificial Sequence
  Synthetic
cuaaauaaccugaguaguu

SEQ ID NO: 7861 - RNA, 19 nt, Artificial Sequence
  Synthetic
cauuagaguuguugaagau

SEQ ID NO: 7862 - RNA, 19 nt, Artificial Sequence
  Synthetic
ugcgaaacuuagagaauua

SEQ ID NO: 7863 - RNA, 19 nt, Artificial Sequence
  Synthetic
gaagauaacucaagaauug

SEQ ID NO: 7864 - RNA, 19 nt, Artificial Sequence
  Synthetic
ggaggaaucaauuguguaa

SEQ ID NO: 7865 - RNA, 19 nt, Artificial Sequence
  Synthetic
gcuagaaagguuugauauu

SEQ ID NO: 7866 - RNA, 19 nt, Artificial Sequence
  Synthetic
gaacacaacagcagauuuu

SEQ ID NO: 7867 - RNA, 19 nt, Artificial Sequence
  Synthetic
gcauggagaaggcuagaaa

SEQ ID NO: 7868 - RNA, 19 nt, Artificial Sequence
  Synthetic
ggagauauggaaagcagaa

SEQ ID NO: 7869 - RNA, 19 nt, Artificial Sequence
  Synthetic
uggcauggauggaacacaa

SEQ ID NO: 7870 - RNA, 19 nt, Artificial Sequence
  Synthetic
gugcaagaguccaguuuca

SEQ ID NO: 7871 - RNA, 19 nt, Artificial Sequence
  Synthetic
gcaagugggaugugcauuu

SEQ ID NO: 7872 - RNA, 19 nt, Artificial Sequence
  Synthetic
gcaaugggagauauggaaa

SEQ ID NO: 7873 - RNA, 19 nt, Artificial Sequence
  Synthetic
aggaaaaucugcuaugaaa

SEQ ID NO: 7874 - RNA, 19 nt, Artificial Sequence
  Synthetic
ccauuagaguuguugaaga

SEQ ID NO: 7875 - RNA, 19 nt, Artificial Sequence
  Synthetic
gaucacguguauuuggaua

SEQ ID NO: 7876 - RNA, 19 nt, Artificial Sequence
  Synthetic
acaaauaugcuucgucuaa

SEQ ID NO: 7877 - RNA, 19 nt, Artificial Sequence
  Synthetic
gcagaagaccagccuguua

SEQ ID NO: 7878 - RNA, 19 nt, Artificial Sequence
  Synthetic
gagaauguauauuuggaga

SEQ ID NO: 7879 - RNA, 19 nt, Artificial Sequence
  Synthetic
caucaaauucuuagcuaga

SEQ ID NO: 7880 - RNA, 19 nt, Artificial Sequence
  Synthetic
ggaaaaucugcuaugaaaa

SEQ ID NO: 7881 - RNA, 19 nt, Artificial Sequence
  Synthetic
ugaaugucaucguguguua

SEQ ID NO: 7882 - RNA, 19 nt, Artificial Sequence
  Synthetic
gcuauaaaccauuagaguu

SEQ ID NO: 7883 - RNA, 19 nt, Artificial Sequence
  Synthetic
ucacuauggucgucagaga

SEQ ID NO: 7884 - RNA, 19 nt, Artificial Sequence
  Synthetic
cagaauaauaggucagaaa

SEQ ID NO: 7885 - RNA, 19 nt, Artificial Sequence
  Synthetic
uaauaaagauggacagcua

SEQ ID NO: 7886 - RNA, 19 nt, Artificial Sequence
  Synthetic
cauuaugaucuaagggaaa

SEQ ID NO: 7887 - RNA, 19 nt, Artificial Sequence
  Synthetic
ggauguugguaaugagcaa

SEQ ID NO: 7888 - RNA, 19 nt, Artificial Sequence
  Synthetic
cguagaaagagcacagaua

SEQ ID NO: 7889 - RNA, 19 nt, Artificial Sequence
  Synthetic
gaacagaagguuucagcaa

SEQ ID NO: 7890 - RNA, 19 nt, Artificial Sequence
  Synthetic
gugaauacucuguugauua

SEQ ID NO: 7891 - RNA, 19 nt, Artificial Sequence
  Synthetic
uuuuagaagaggaaggaaa

SEQ ID NO: 7892 - RNA, 19 nt, Artificial Sequence
  Synthetic
gcuauuaacuccaccuaua

SEQ ID NO: 7893 - RNA, 19 nt, Artificial Sequence
  Synthetic
cuucaaaccuagaacgaca

SEQ ID NO: 7894 - RNA, 19 nt, Artificial Sequence
  Synthetic
ggauaaacaugcacagcga

SEQ ID NO: 7895 - RNA, 19 nt, Artificial Sequence
  Synthetic
gaauggaggaaguaguaaa

SEQ ID NO: 7896 - RNA, 19 nt, Artificial Sequence
  Synthetic
ccacaggaaacuuugguaa

SEQ ID NO: 7897 - RNA, 19 nt, Artificial Sequence
  Synthetic
ccaccaaguugcaauuaua

SEQ ID NO: 7898 - RNA, 19 nt, Artificial Sequence
  Synthetic
cagauagggugcaagacaa

SEQ ID NO: 7899 - RNA, 19 nt, Artificial Sequence
  Synthetic
gaacaaaacagcaagagaa

SEQ ID NO: 7900 - RNA, 19 nt, Artificial Sequence
  Synthetic
ucccaaagugcuaggauua

SEQ ID NO: 7901 - RNA, 19 nt, Artificial Sequence
  Synthetic
agauagggugcaagacaaa

SEQ ID NO: 7902 - RNA, 19 nt, Artificial Sequence
  Synthetic
cugcaaaggaguuuccaaa

SEQ ID NO: 7903 - RNA, 19 nt, Artificial Sequence
  Synthetic
gagaauggaguaagugauu

SEQ ID NO: 7904 - RNA, 19 nt, Artificial Sequence
  Synthetic
gaaugauaagcaaaggaua

SEQ ID NO: 7905 - RNA, 19 nt, Artificial Sequence
  Synthetic
cagaggagguagcugacaa

SEQ ID NO: 7906 - RNA, 19 nt, Artificial Sequence
  Synthetic
ucucaaaucuucaaaccua

SEQ ID NO: 7907 - RNA, 19 nt, Artificial Sequence
  Synthetic
acauuaugaucuaagggaa

SEQ ID NO: 7908 - RNA, 19 nt, Artificial Sequence
  Synthetic
cuugaagagucauguggaa

SEQ ID NO: 7909 - RNA, 19 nt, Artificial Sequence
  Synthetic
acagaagguuucagcaaaa

SEQ ID NO: 7910 - RNA, 19 nt, Artificial Sequence
  Synthetic
acaaagugcugaaugcaau

SEQ ID NO: 7911 - RNA, 19 nt, Artificial Sequence
  Synthetic
cagcaaaauucuuuaguga

SEQ ID NO: 7912 - RNA, 19 nt, Artificial Sequence
  Synthetic
cuuuggauguguacgguua

SEQ ID NO: 7913 - RNA, 19 nt, Artificial Sequence
  Synthetic
gcuauaagcaugcaauaau

SEQ ID NO: 7914 - RNA, 19 nt, Artificial Sequence
  Synthetic
uggagaagcugaagagaga

SEQ ID NO: 7915 - RNA, 19 nt, Artificial Sequence
  Synthetic
gcacacacacgauggaaua

SEQ ID NO: 7916 - RNA, 19 nt, Artificial Sequence
  Synthetic
gagaggagucagagccaua

SEQ ID NO: 7917 - RNA, 19 nt, Artificial Sequence
  Synthetic
ggugguagcaagaggagua

SEQ ID NO: 7918 - RNA, 19 nt, Artificial Sequence
  Synthetic
ugagaacccugaugagaua

SEQ ID NO: 7919 - RNA, 19 nt, Artificial Sequence
  Synthetic
gaagaaaggaauaucucua

SEQ ID NO: 7920 - RNA, 19 nt, Artificial Sequence
  Synthetic
aaagauaguugauguguga

SEQ ID NO: 7921 - RNA, 19 nt, Artificial Sequence
  Synthetic
agaucaaggucaacaauca

SEQ ID NO: 7922 - RNA, 19 nt, Artificial Sequence
  Synthetic
agaccaagaagaagcauuu

SEQ ID NO: 7923 - RNA, 19 nt, Artificial Sequence
  Synthetic
caagaggaguacccaguua

SEQ ID NO: 7924 - RNA, 19 nt, Artificial Sequence
  Synthetic
gggccaggguguaggauuc

SEQ ID NO: 7925 - RNA, 19 nt, Artificial Sequence
  Synthetic
ccuaagaggacucaugauu

SEQ ID NO: 7926 - RNA, 19 nt, Artificial Sequence
  Synthetic
uaagaggacucaugauuau

SEQ ID NO: 7927 - RNA, 19 nt, Artificial Sequence
  Synthetic
cuaagaggacucaugauua

SEQ ID NO: 7928 - RNA, 19 nt, Artificial Sequence
  Synthetic
agacaaggguuuagaaaga

SEQ ID NO: 7929 - RNA, 19 nt, Artificial Sequence
  Synthetic
gguaagaaacugaaagcaa

SEQ ID NO: 7930 - RNA, 19 nt, Artificial Sequence
  Synthetic
gcucaugccaacuggaaua

SEQ ID NO: 7931 - RNA, 19 nt, Artificial Sequence
  Synthetic
guaucaacuuagagaaaga

SEQ ID NO: 7932 - RNA, 19 nt, Artificial Sequence
  Synthetic
acagauggcucuaguuaaa

SEQ ID NO: 7933 - RNA, 19 nt, Artificial Sequence
  Synthetic
gcaagaggaggaagauaaa

SEQ ID NO: 7934 - RNA, 19 nt, Artificial Sequence
  Synthetic
ggacaugcuugcaagagaa

SEQ ID NO: 7935 - RNA, 19 nt, Artificial Sequence
  Synthetic
gaaagcaagaggaggaaga

SEQ ID NO: 7936 - RNA, 19 nt, Artificial Sequence
  Synthetic
ggaacuggcuagggugaaa

SEQ ID NO: 7937 - RNA, 19 nt, Artificial Sequence
  Synthetic
ggcucaaucucuaguauua

SEQ ID NO: 7938 - RNA, 19 nt, Artificial Sequence
  Synthetic
cagcagacuuugugcgcau

SEQ ID NO: 7939 - RNA, 19 nt, Artificial Sequence
  Synthetic
ccaaagaaacaaaugucua

SEQ ID NO: 7940 - RNA, 19 nt, Artificial Sequence
  Synthetic
acaaauacuucaagguguu

SEQ ID NO: 7941 - RNA, 19 nt, Artificial Sequence
  Synthetic
guagaaagugccucaauua

SEQ ID NO: 7942 - RNA, 19 nt, Artificial Sequence
  Synthetic
ugauuugcuucuagguaua

SEQ ID NO: 7943 - RNA, 19 nt, Artificial Sequence
  Synthetic
aggcaaugcuucaaguaga

SEQ ID NO: 7944 - RNA, 19 nt, Artificial Sequence
  Synthetic
gggacaugcuugcaagaga

SEQ ID NO: 7945 - RNA, 19 nt, Artificial Sequence
  Synthetic
agaaagugccucaauuaaa

SEQ ID NO: 7946 - RNA, 19 nt, Artificial Sequence
  Synthetic
gaaacuacaggaagaagua

SEQ ID NO: 7947 - RNA, 19 nt, Artificial Sequence
  Synthetic
uagcaaggcucaacuuuaa

SEQ ID NO: 7948 - RNA, 19 nt, Artificial Sequence
  Synthetic
cugagaugguguucuguaa

SEQ ID NO: 7949 - RNA, 19 nt, Artificial Sequence
  Synthetic
gaagggagguaucaacuua

SEQ ID NO: 7950 - RNA, 19 nt, Artificial Sequence
  Synthetic
acuucaagguguugcuuau

SEQ ID NO: 7951 - RNA, 19 nt, Artificial Sequence
  Synthetic
ccaugagaacuguguggua

SEQ ID NO: 7952 - RNA, 19 nt, Artificial Sequence
  Synthetic
agagaaagacaaggguuua

SEQ ID NO: 7953 - RNA, 19 nt, Artificial Sequence
  Synthetic
agacagauggcucuaguua

SEQ ID NO: 7954 - RNA, 19 nt, Artificial Sequence
  Synthetic
ggcaaugcuucaaguagaa

SEQ ID NO: 7955 - RNA, 19 nt, Artificial Sequence
  Synthetic
gaaagagaagggaaaguca

SEQ ID NO: 7956 - RNA, 19 nt, Artificial Sequence
  Synthetic
gaagucaaguagacaguga

SEQ ID NO: 7957 - RNA, 19 nt, Artificial Sequence
  Synthetic
ugucaauacuugcccaaau

SEQ ID NO: 7958 - RNA, 19 nt, Artificial Sequence
  Synthetic
gcuaagaagugcugagaag

SEQ ID NO: 7959 - RNA, 19 nt, Artificial Sequence
  Synthetic
ggaacuacacgguggugaa

SEQ ID NO: 7960 - RNA, 19 nt, Artificial Sequence
  Synthetic
aaucagaggaugugcagua

SEQ ID NO: 7961 - RNA, 19 nt, Artificial Sequence
  Synthetic
ccgaaugucugcagaggau

SEQ ID NO: 7962 - RNA, 19 nt, Artificial Sequence
  Synthetic
acaacgacaucaaggacua

SEQ ID NO: 7963 - RNA, 19 nt, Artificial Sequence
  Synthetic
agaaaucgcuguagcacau

SEQ ID NO: 7964 - RNA, 19 nt, Artificial Sequence
  Synthetic
ccagaaugggaguuugaaa

SEQ ID NO: 7965 - RNA, 19 nt, Artificial Sequence
  Synthetic
cugcagaggaucuuuaaua

SEQ ID NO: 7966 - RNA, 19 nt, Artificial Sequence
  Synthetic
cugggaagcacuugaggua

SEQ ID NO: 7967 - RNA, 19 nt, Artificial Sequence
  Synthetic
ucauggaggugcagaggau

SEQ ID NO: 7968 - RNA, 19 nt, Artificial Sequence
  Synthetic
ccaccgaugccaugaagaa

SEQ ID NO: 7969 - RNA, 19 nt, Artificial Sequence
  Synthetic
ggauacaacagcaaacauu

SEQ ID NO: 7970 - RNA, 19 nt, Artificial Sequence
  Synthetic
gagcagaagaccucaggau

SEQ ID NO: 7971 - RNA, 19 nt, Artificial Sequence
  Synthetic
gaagaaaagcggaggaaug

SEQ ID NO: 7972 - RNA, 19 nt, Artificial Sequence
  Synthetic
gugcaaacauagccacuuu

SEQ ID NO: 7973 - RNA, 19 nt, Artificial Sequence
  Synthetic
ccagggaguucgacauuuu

SEQ ID NO: 7974 - RNA, 19 nt, Artificial Sequence
  Synthetic
ggacacaugcucacccaaa

SEQ ID NO: 7975 - RNA, 19 nt, Artificial Sequence
  Synthetic
gaaaagcggaggaaugaaa

SEQ ID NO: 7976 - RNA, 19 nt, Artificial Sequence
  Synthetic
acaucaagcuaucugacua

SEQ ID NO: 7977 - RNA, 19 nt, Artificial Sequence
  Synthetic
ccuauggaauggugcucua

SEQ ID NO: 7978 - RNA, 19 nt, Artificial Sequence
  Synthetic
aagaagugcugagaaguua

SEQ ID NO: 7979 - RNA, 19 nt, Artificial Sequence
  Synthetic
ggaaggagcuguaaagaga

SEQ ID NO: 7980 - RNA, 19 nt, Artificial Sequence
  Synthetic
caagagagaugcugugaaa

SEQ ID NO: 7981 - RNA, 19 nt, Artificial Sequence
  Synthetic
ccacauugguuguuagauu

SEQ ID NO: 7982 - RNA, 19 nt, Artificial Sequence
  Synthetic
gcugagaacagaagugaga

SEQ ID NO: 7983 - RNA, 19 nt, Artificial Sequence
  Synthetic
gcacaaaguugcacucuca

SEQ ID NO: 7984 - RNA, 19 nt, Artificial Sequence
  Synthetic
ggaagaaacacuaaaccuu

SEQ ID NO: 7985 - RNA, 19 nt, Artificial Sequence
  Synthetic
gagaauggacugcaagaga

SEQ ID NO: 7986 - RNA, 19 nt, Artificial Sequence
  Synthetic
acacuaugcuuacugaaua

SEQ ID NO: 7987 - RNA, 19 nt, Artificial Sequence
  Synthetic
gcugaagcguguuggggaa

SEQ ID NO: 7988 - RNA, 19 nt, Artificial Sequence
  Synthetic
gcuguguaauccugagaau

SEQ ID NO: 7989 - RNA, 19 nt, Artificial Sequence
  Synthetic
gaccugagcuggagaagga

SEQ ID NO: 7990 - RNA, 19 nt, Artificial Sequence
  Synthetic
acaagcaacuucagcauuu

SEQ ID NO: 7991 - RNA, 19 nt, Artificial Sequence
  Synthetic
ugagaacagaagugagaca

SEQ ID NO: 7992 - RNA, 19 nt, Artificial Sequence
  Synthetic
gggaaucuauuguggaaac

SEQ ID NO: 7993 - RNA, 19 nt, Artificial Sequence
  Synthetic
gaugacaacacuaugcuua

SEQ ID NO: 7994 - RNA, 19 nt, Artificial Sequence
  Synthetic
ggagugauaugguccgauu

SEQ ID NO: 7995 - RNA, 19 nt, Artificial Sequence
  Synthetic
cugaguggaaggagcacaa

SEQ ID NO: 7996 - RNA, 19 nt, Artificial Sequence
  Synthetic
aggacguucuggagaccua

SEQ ID NO: 7997 - RNA, 19 nt, Artificial Sequence
  Synthetic
gauccuguuugcuguguaa

SEQ ID NO: 7998 - RNA, 19 nt, Artificial Sequence
  Synthetic
aagauugacauuuggaaga

SEQ ID NO: 7999 - RNA, 19 nt, Artificial Sequence
  Synthetic
cuucaucgcuccucgacaa

SEQ ID NO: 8000 - RNA, 19 nt, Artificial Sequence
  Synthetic
ccucuagguuccuugagua

SEQ ID NO: 8001 - RNA, 19 nt, Artificial Sequence
  Synthetic
gcuccgggaugcuggugaa

SEQ ID NO: 8002 - RNA, 19 nt, Artificial Sequence
  Synthetic
gaagaaacacuaaaccuuu

SEQ ID NO: 8003 - RNA, 19 nt, Artificial Sequence
  Synthetic
aggauaggacagaugaaaa

SEQ ID NO: 8004 - RNA, 19 nt, Artificial Sequence
  Synthetic
cauaugaugagaagauuga

SEQ ID NO: 8005 - RNA, 19 nt, Artificial Sequence
  Synthetic
agccagacucccucagaaa

SEQ ID NO: 8006 - RNA, 19 nt, Artificial Sequence
  Synthetic
cacauugaagggagugaua

SEQ ID NO: 8007 - RNA, 19 nt, Artificial Sequence
  Synthetic
gaguaaccuggaagaaaca

SEQ ID NO: 8008 - RNA, 19 nt, Artificial Sequence
  Synthetic
gcaagagagaugcugugaa

SEQ ID NO: 8009 - RNA, 19 nt, Artificial Sequence
  Synthetic
gguuaaagcugaugggaua

SEQ ID NO: 8010 - RNA, 19 nt, Artificial Sequence
  Synthetic
guaacaagguugggauaua

SEQ ID NO: 8011 - RNA, 19 nt, Artificial Sequence
  Synthetic
augugaagauggagaauau

SEQ ID NO: 8012 - RNA, 19 nt, Artificial Sequence
  Synthetic
gcaaagaggagguuagcau

SEQ ID NO: 8013 - RNA, 19 nt, Artificial Sequence
  Synthetic
cagugaagguggugcccaa

SEQ ID NO: 8014 - RNA, 19 nt, Artificial Sequence
  Synthetic
ggucagaucuggaagaacu

SEQ ID NO: 8015 - RNA, 19 nt, Artificial Sequence
  Synthetic
gggacagcuggcagggaaa

SEQ ID NO: 8016 - RNA, 19 nt, Artificial Sequence
  Synthetic
cugaauugcuguuugguuu

SEQ ID NO: 8017 - RNA, 19 nt, Artificial Sequence
  Synthetic
ggaagaacucugggaacua

SEQ ID NO: 8018 - RNA, 19 nt, Artificial Sequence
  Synthetic
cugaugggauacaggaauu

SEQ ID NO: 8019 - RNA, 19 nt, Artificial Sequence
  Synthetic
cagcaaguguuuauguauu

SEQ ID NO: 8020 - RNA, 19 nt, Artificial Sequence
  Synthetic
gagcccaauuuguggucua

SEQ ID NO: 8021 - RNA, 19 nt, Artificial Sequence
  Synthetic
agguggugcccaagguaaa

SEQ ID NO: 8022 - RNA, 19 nt, Artificial Sequence
  Synthetic
gagaugugaagauggagaa

SEQ ID NO: 8023 - RNA, 19 nt, Artificial Sequence
  Synthetic
ugaacgaggccaucugaaa

SEQ ID NO: 8024 - RNA, 19 nt, Artificial Sequence
  Synthetic
ccuuaaggacacuaaauau

SEQ ID NO: 8025 - RNA, 19 nt, Artificial Sequence
  Synthetic
gcauccagccugagcaaca

SEQ ID NO: 8026 - RNA, 19 nt, Artificial Sequence
  Synthetic
uaagaaugcgugggagaaa

SEQ ID NO: 8027 - RNA, 19 nt, Artificial Sequence
  Synthetic
cgagaugugaagauggaga

SEQ ID NO: 8028 - RNA, 19 nt, Artificial Sequence
  Synthetic
cuacagagggauaccguga

SEQ ID NO: 8029 - RNA, 19 nt, Artificial Sequence
  Synthetic
ccagaaagcuguauuugca

SEQ ID NO: 8030 - RNA, 19 nt, Artificial Sequence
  Synthetic
uggaagaacucugggaacu

SEQ ID NO: 8031 - RNA, 19 nt, Artificial Sequence
  Synthetic
gagagagguuaaagcugau

SEQ ID NO: 8032 - RNA, 19 nt, Artificial Sequence
  Synthetic
uaacaagguugggauauaa

SEQ ID NO: 8033 - RNA, 19 nt, Artificial Sequence
  Synthetic
caagguugggauauaaaua

SEQ ID NO: 8034 - RNA, 19 nt, Artificial Sequence
  Synthetic
gcugggaaugggagcagua

SEQ ID NO: 8035 - RNA, 19 nt, Artificial Sequence
  Synthetic
cuaccagaguuucccauua

SEQ ID NO: 8036 - RNA, 19 nt, Artificial Sequence
  Synthetic
gcuagauugcacccagaaa

SEQ ID NO: 8037 - RNA, 19 nt, Artificial Sequence
  Synthetic
agaaugcgugggagaaauu

SEQ ID NO: 8038 - RNA, 19 nt, Artificial Sequence
  Synthetic
ggaggcagaggcugggaau

SEQ ID NO: 8039 - RNA, 19 nt, Artificial Sequence
  Synthetic
ccgaagagucagaggauga

SEQ ID NO: 8040 - RNA, 19 nt, Artificial Sequence
  Synthetic
gagccaagaagaagagcaa

SEQ ID NO: 8041 - RNA, 19 nt, Artificial Sequence
  Synthetic
gcacacggcagcagaagaa

SEQ ID NO: 8042 - RNA, 19 nt, Artificial Sequence
  Synthetic
augaagagguccaugauga

SEQ ID NO: 8043 - RNA, 19 nt, Artificial Sequence
  Synthetic
aauauaacguacaggaguu

SEQ ID NO: 8044 - RNA, 19 nt, Artificial Sequence
  Synthetic
ggaaauagaggcugaguua

SEQ ID NO: 8045 - RNA, 19 nt, Artificial Sequence
  Synthetic
gggcauauauacuaguaaa

SEQ ID NO: 8046 - RNA, 19 nt, Artificial Sequence
  Synthetic
gaagaaagacuauggaaaa

SEQ ID NO: 8047 - RNA, 19 nt, Artificial Sequence
  Synthetic
ugaagaaagacuauggaaa

SEQ ID NO: 8048 - RNA, 19 nt, Artificial Sequence
  Synthetic
ggaacaggaucaagaccaa

SEQ ID NO: 8049 - RNA, 19 nt, Artificial Sequence
  Synthetic
aagaaggguuauagagaga

SEQ ID NO: 8050 - RNA, 19 nt, Artificial Sequence
  Synthetic
gggagaaaaugcugcaaaa

SEQ ID NO: 8051 - RNA, 19 nt, Artificial Sequence
  Synthetic
ggacuucacuggaggaaca

SEQ ID NO: 8052 - RNA, 19 nt, Artificial Sequence
  Synthetic
gaacgaagacgcacacaaa

SEQ ID NO: 8053 - RNA, 19 nt, Artificial Sequence
  Synthetic
ccauuuuacugaagaaaga

SEQ ID NO: 8054 - RNA, 19 nt, Artificial Sequence
  Synthetic
ggagaaagacaaucccaaa

SEQ ID NO: 8055 - RNA, 19 nt, Artificial Sequence
  Synthetic
caauagaucaccaaagaau

SEQ ID NO: 8056 - RNA, 19 nt, Artificial Sequence
  Synthetic
cagaguaacccuuguaauu

SEQ ID NO: 8057 - RNA, 19 nt, Artificial Sequence
  Synthetic
ccgagguacugaagaguga

SEQ ID NO: 8058 - RNA, 19 nt, Artificial Sequence
  Synthetic
agauacauauucagaggua

SEQ ID NO: 8059 - RNA, 19 nt, Artificial Sequence
  Synthetic
auucagagguagaugauga

SEQ ID NO: 8060 - RNA, 19 nt, Artificial Sequence
  Synthetic
ugaauuggaggaaggaaua

SEQ ID NO: 8061 - RNA, 19 nt, Artificial Sequence
  Synthetic
ccuggaaaaugcugagaaa

SEQ ID NO: 8062 - RNA, 19 nt, Artificial Sequence
  Synthetic
uggaaaaugcugagaaaga

SEQ ID NO: 8063 - RNA, 19 nt, Artificial Sequence
  Synthetic
gaaaguggcuauuacaauu

SEQ ID NO: 8064 - RNA, 19 nt, Artificial Sequence
  Synthetic
gaaggguuauagagagauu

SEQ ID NO: 8065 - RNA, 19 nt, Artificial Sequence
  Synthetic
aagagaaguuuuagugcuu

SEQ ID NO: 8066 - RNA, 19 nt, Artificial Sequence
  Synthetic
aaauaguggaggcgguaua

SEQ ID NO: 8067 - RNA, 19 nt, Artificial Sequence
  Synthetic
ccaaaugacccuacagguu

SEQ ID NO: 8068 - RNA, 19 nt, Artificial Sequence
  Synthetic
ggaggaaggaauaacauau

SEQ ID NO: 8069 - RNA, 19 nt, Artificial Sequence
  Synthetic
gaauuggacauuucggaua

SEQ ID NO: 8070 - RNA, 19 nt, Artificial Sequence
  Synthetic
ggaaaguggcuauuacaau

SEQ ID NO: 8071 - RNA, 19 nt, Artificial Sequence
  Synthetic
gggcccacauuaaggaaau

SEQ ID NO: 8072 - RNA, 19 nt, Artificial Sequence
  Synthetic
ucucaaagaucaugguagu

SEQ ID NO: 8073 - RNA, 19 nt, Artificial Sequence
  Synthetic
auacauauucagagguaga

SEQ ID NO: 8074 - RNA, 19 nt, Artificial Sequence
  Synthetic
caauaaagccugcuggaua

SEQ ID NO: 8075 - RNA, 19 nt, Artificial Sequence
  Synthetic
cccucaaacuggagagauu

SEQ ID NO: 8076 - RNA, 19 nt, Artificial Sequence
  Synthetic
cggcugacucugagaagaa

SEQ ID NO: 8077 - RNA, 19 nt, Artificial Sequence
  Synthetic
ggaguugggcugaggauuu

SEQ ID NO: 8078 - RNA, 19 nt, Artificial Sequence
  Synthetic
gcauagagacaacgacaau

SEQ ID NO: 8079 - RNA, 19 nt, Artificial Sequence
  Synthetic
agaaacugcuggaguauca

SEQ ID NO: 8080 - RNA, 19 nt, Artificial Sequence
  Synthetic
cucagaaacugcuggagua

SEQ ID NO: 8081 - RNA, 19 nt, Artificial Sequence
  Synthetic
ugaccuauguccaaagcaa

SEQ ID NO: 8082 - RNA, 19 nt, Artificial Sequence
  Synthetic
cauacacagucuucgaaua

SEQ ID NO: 8083 - RNA, 19 nt, Artificial Sequence
  Synthetic
cuggagaaccugaucuuaa

SEQ ID NO: 8084 - RNA, 19 nt, Artificial Sequence
  Synthetic
gcccaggauuguaauauua

SEQ ID NO: 8085 - RNA, 19 nt, Artificial Sequence
  Synthetic
uggagaaccugaucuuaaa

SEQ ID NO: 8086 - RNA, 19 nt, Artificial Sequence
  Synthetic
cagcugacuuggagcaguu

SEQ ID NO: 8087 - RNA, 19 nt, Artificial Sequence
  Synthetic
gagagaaacuuggggaaga

SEQ ID NO: 8088 - RNA, 19 nt, Artificial Sequence
  Synthetic
cgacaaugugcccaggauu

SEQ ID NO: 8089 - RNA, 19 nt, Artificial Sequence
  Synthetic
gugggcaacugcugaaaga

SEQ ID NO: 8090 - RNA, 19 nt, Artificial Sequence
  Synthetic
gcuggagacggcucagaaa

SEQ ID NO: 8091 - RNA, 19 nt, Artificial Sequence
  Synthetic
cggcagagccagugguaca

SEQ ID NO: 8092 - RNA, 19 nt, Artificial Sequence
  Synthetic
ccagaaggacagcaggaaa

SEQ ID NO: 8093 - RNA, 19 nt, Artificial Sequence
  Synthetic
agaaggaggcugcggguau

SEQ ID NO: 8094 - RNA, 19 nt, Artificial Sequence
  Synthetic
ccaucaagauccucaagaa

SEQ ID NO: 8095 - RNA, 19 nt, Artificial Sequence
  Synthetic
ucaagauccucaagaauga

SEQ ID NO: 8096 - RNA, 19 nt, Artificial Sequence
  Synthetic
caucaagauccucaagaau

SEQ ID NO: 8097 - RNA, 19 nt, Artificial Sequence
  Synthetic
gcuacgugaaggagccaua

SEQ ID NO: 8098 - RNA, 19 nt, Artificial Sequence
  Synthetic
cgucguggccgcagaagau

SEQ ID NO: 8099 - RNA, 19 nt, Artificial Sequence
  Synthetic
ggagaaggcaccagguaug

SEQ ID NO: 8100 - RNA, 19 nt, Artificial Sequence
  Synthetic
cagaaggacagcaggaaag

SEQ ID NO: 8101 - RNA, 19 nt, Artificial Sequence
  Synthetic
ggccagacccugagcucuu

SEQ ID NO: 8102 - RNA, 19 nt, Artificial Sequence
  Synthetic
gaggagaaggcaccaggua

SEQ ID NO: 8103 - RNA, 19 nt, Artificial Sequence
  Synthetic
ggcccaacauugacaacau

SEQ ID NO: 8104 - RNA, 19 nt, Artificial Sequence
  Synthetic
aaacagagccucagagaga

SEQ ID NO: 8105 - RNA, 19 nt, Artificial Sequence
  Synthetic
gcaaugugcuggagcccaa

SEQ ID NO: 8106 - RNA, 19 nt, Artificial Sequence
  Synthetic
gcacaggccuucucguuua

SEQ ID NO: 8107 - RNA, 19 nt, Artificial Sequence
  Synthetic
ccucagugcauaaggaaga

SEQ ID NO: 8108 - RNA, 19 nt, Artificial Sequence
  Synthetic
cugcagacuggcuggauaa

SEQ ID NO: 8109 - RNA, 19 nt, Artificial Sequence
  Synthetic
gaugaaauugacuggcuaa

SEQ ID NO: 8110 - RNA, 19 nt, Artificial Sequence
  Synthetic
agaugaagcugaacacaga

SEQ ID NO: 8111 - RNA, 19 nt, Artificial Sequence
  Synthetic
gcugcagacuggcuggaua

SEQ ID NO: 8112 - RNA, 19 nt, Artificial Sequence
  Synthetic
ccugaagucuuguggaguu

SEQ ID NO: 8113 - RNA, 19 nt, Artificial Sequence
  Synthetic
ggaaguugcacuagaugau

SEQ ID NO: 8114 - RNA, 19 nt, Artificial Sequence
  Synthetic
agucagggccaaugaguga

SEQ ID NO: 8115 - RNA, 19 nt, Artificial Sequence
  Synthetic
ggacugcacugccaaguaa

SEQ ID NO: 8116 - RNA, 19 nt, Artificial Sequence
  Synthetic
gagcguagguggcaauuga

SEQ ID NO: 8117 - RNA, 19 nt, Artificial Sequence
  Synthetic
gcggguaccugcaaggaga

SEQ ID NO: 8118 - RNA, 19 nt, Artificial Sequence
  Synthetic
ggauugggaaguugcacua

SEQ ID NO: 8119 - RNA, 19 nt, Artificial Sequence
  Synthetic
agagugugcccuagaggaa

SEQ ID NO: 8120 - RNA, 19 nt, Artificial Sequence
  Synthetic
ggauacagagggugaugau

SEQ ID NO: 8121 - RNA, 19 nt, Artificial Sequence
  Synthetic
ucacagaugaagaaacaga

SEQ ID NO: 8122 - RNA, 19 nt, Artificial Sequence
  Synthetic
ggcaauaaaggaagucauu

SEQ ID NO: 8123 - RNA, 19 nt, Artificial Sequence
  Synthetic
gagugaacuuacuagauga

SEQ ID NO: 8124 - RNA, 19 nt, Artificial Sequence
  Synthetic
aguaaugggugggaggaga

SEQ ID NO: 8125 - RNA, 19 nt, Artificial Sequence
  Synthetic
guagguggcaauugagaga

SEQ ID NO: 8126 - RNA, 19 nt, Artificial Sequence
  Synthetic
gggaaguugcacuagauga

SEQ ID NO: 8127 - RNA, 19 nt, Artificial Sequence
  Synthetic
gggagauccuucauguuga

SEQ ID NO: 8128 - RNA, 19 nt, Artificial Sequence
  Synthetic
aaguugcacuagaugauua

SEQ ID NO: 8129 - RNA, 19 nt, Artificial Sequence
  Synthetic
ggagcuaggauuugaauuc

SEQ ID NO: 8130 - RNA, 19 nt, Artificial Sequence
  Synthetic
guaaugggugggaggagau

SEQ ID NO: 8131 - RNA, 19 nt, Artificial Sequence
  Synthetic
cauuagggaucuauaucuu

SEQ ID NO: 8132 - RNA, 19 nt, Artificial Sequence
  Synthetic
ccuccuggguucaagcaau

SEQ ID NO: 8133 - RNA, 19 nt, Artificial Sequence
  Synthetic
cugaguagcugggauuaua

SEQ ID NO: 8134 - RNA, 19 nt, Artificial Sequence
  Synthetic
ggauuugaguugaggaaaa

SEQ ID NO: 8135 - RNA, 19 nt, Artificial Sequence
  Synthetic
agucaaaucuacagcauau

SEQ ID NO: 8136 - RNA, 19 nt, Artificial Sequence
  Synthetic
ggugugaagagaugaaaua

SEQ ID NO: 8137 - RNA, 19 nt, Artificial Sequence
  Synthetic
ugaaagaaaucaaggaaac

SEQ ID NO: 8138 - RNA, 19 nt, Artificial Sequence
  Synthetic
gaugaaauacugcaagaaa

SEQ ID NO: 8139 - RNA, 19 nt, Artificial Sequence
  Synthetic
gcuaagaagagauaaugaa

SEQ ID NO: 8140 - RNA, 19 nt, Artificial Sequence
  Synthetic
gagaugaaauacugcaaga

SEQ ID NO: 8141 - RNA, 19 nt, Artificial Sequence
  Synthetic
ggagggcacuggacagaaa

SEQ ID NO: 8142 - RNA, 19 nt, Artificial Sequence
  Synthetic
ugaaauacugcaagaaaca

SEQ ID NO: 8143 - RNA, 19 nt, Artificial Sequence
  Synthetic
gcuaauggggagauagaaa

SEQ ID NO: 8144 - RNA, 19 nt, Artificial Sequence
  Synthetic
caccugaacuccacggaaa

SEQ ID NO: 8145 - RNA, 19 nt, Artificial Sequence
  Synthetic
gagcuguuggauagggaaa

SEQ ID NO: 8146 - RNA, 19 nt, Artificial Sequence
  Synthetic
gaugcuaagaagagauaau

SEQ ID NO: 8147 - RNA, 19 nt, Artificial Sequence
  Synthetic
ccaaucaagaccagaagaa

SEQ ID NO: 8148 - RNA, 19 nt, Artificial Sequence
  Synthetic
aagugaagcuugcaggauu

SEQ ID NO: 8149 - RNA, 19 nt, Artificial Sequence
  Synthetic
ggaaaucgccacuggagau

SEQ ID NO: 8150 - RNA, 19 nt, Artificial Sequence
  Synthetic
ggaaucguccucugggaaa

SEQ ID NO: 8151 - RNA, 19 nt, Artificial Sequence
  Synthetic
uugggaacuacgagagaaa

SEQ ID NO: 8152 - RNA, 19 nt, Artificial Sequence
  Synthetic
gcucaaacuuccugguaac

SEQ ID NO: 8153 - RNA, 19 nt, Artificial Sequence
  Synthetic
ugagcaugcuggagaauga

SEQ ID NO: 8154 - RNA, 19 nt, Artificial Sequence
  Synthetic
caaccaacauggcagcuaa

SEQ ID NO: 8155 - RNA, 19 nt, Artificial Sequence
  Synthetic
ucacugagacgauuagaaa

SEQ ID NO: 8156 - RNA, 19 nt, Artificial Sequence
  Synthetic
agugaagcuugcaggauuu

SEQ ID NO: 8157 - RNA, 19 nt, Artificial Sequence
  Synthetic
gaucaaaaccaugaagaaa

SEQ ID NO: 8158 - RNA, 19 nt, Artificial Sequence
  Synthetic
gcagcuaacacaugaauga

SEQ ID NO: 8159 - RNA, 19 nt, Artificial Sequence
  Synthetic
ucaaggacgugaacaggaa

SEQ ID NO: 8160 - RNA, 19 nt, Artificial Sequence
  Synthetic
aaagacagacagagucaaa

SEQ ID NO: 8161 - RNA, 19 nt, Artificial Sequence
  Synthetic
cugagggagcuguuggaua

SEQ ID NO: 8162 - RNA, 19 nt, Artificial Sequence
  Synthetic
gagaaaagacagacagagu

SEQ ID NO: 8163 - RNA, 19 nt, Artificial Sequence
  Synthetic
caugaaagaaaucaaggaa

SEQ ID NO: 8164 - RNA, 19 nt, Artificial Sequence
  Synthetic
aggcauaaguggcaggauu

SEQ ID NO: 8165 - RNA, 19 nt, Artificial Sequence
  Synthetic
ccucauaauuccagagaag

SEQ ID NO: 8166 - RNA, 19 nt, Artificial Sequence
  Synthetic
agcagaaucuccaggguua

SEQ ID NO: 8167 - RNA, 19 nt, Artificial Sequence
  Synthetic
ugugauaggcaaaggauuu

SEQ ID NO: 8168 - RNA, 19 nt, Artificial Sequence
  Synthetic
ucacaucauucauggcaua

SEQ ID NO: 8169 - RNA, 19 nt, Artificial Sequence
  Synthetic
gacccgaggcugaggcaua

SEQ ID NO: 8170 - RNA, 19 nt, Artificial Sequence
  Synthetic
gugacuguacggaggauua

SEQ ID NO: 8171 - RNA, 19 nt, Artificial Sequence
  Synthetic
ccuagaagcuuguuccaau

SEQ ID NO: 8172 - RNA, 19 nt, Artificial Sequence
  Synthetic
agugaaagggcaaguagua

SEQ ID NO: 8173 - RNA, 19 nt, Artificial Sequence
  Synthetic
ugacugauugggaaagaaa

SEQ ID NO: 8174 - RNA, 19 nt, Artificial Sequence
  Synthetic
ggcauaaguggcaggauuu

SEQ ID NO: 8175 - RNA, 19 nt, Artificial Sequence
  Synthetic
cuagcaagguacaaaccaa

SEQ ID NO: 8176 - RNA, 19 nt, Artificial Sequence
  Synthetic
aguaggaacucaugucauu

SEQ ID NO: 8177 - RNA, 19 nt, Artificial Sequence
  Synthetic
cugugaaucuagcaaggua

SEQ ID NO: 8178 - RNA, 19 nt, Artificial Sequence
  Synthetic
gugaaagggcaaguaguaa

SEQ ID NO: 8179 - RNA, 19 nt, Artificial Sequence
  Synthetic
aaacaggaggucaugagua

SEQ ID NO: 8180 - RNA, 19 nt, Artificial Sequence
  Synthetic
gaaagaaagcugagaagaa

SEQ ID NO: 8181 - RNA, 19 nt, Artificial Sequence
  Synthetic
uggcaauaauagaaggaaa

SEQ ID NO: 8182 - RNA, 19 nt, Artificial Sequence
  Synthetic
aagauugacuugagaguaa

SEQ ID NO: 8183 - RNA, 19 nt, Artificial Sequence
  Synthetic
ggaaagaauaagauggcua

SEQ ID NO: 8184 - RNA, 19 nt, Artificial Sequence
  Synthetic
ggagaaggcaugagaaaga

SEQ ID NO: 8185 - RNA, 19 nt, Artificial Sequence
  Synthetic
guagagauguacagugaaa

SEQ ID NO: 8186 - RNA, 19 nt, Artificial Sequence
  Synthetic
ccaacuaccucaagagcaa

SEQ ID NO: 8187 - RNA, 19 nt, Artificial Sequence
  Synthetic
gaacaaagacaaaggacuu

SEQ ID NO: 8188 - RNA, 19 nt, Artificial Sequence
  Synthetic
ggacguaacugaagaggau

SEQ ID NO: 8189 - RNA, 19 nt, Artificial Sequence
  Synthetic
gggcaaaucacuuggaaga

SEQ ID NO: 8190 - RNA, 19 nt, Artificial Sequence
  Synthetic
caacaaggaugcagcacua

SEQ ID NO: 8191 - RNA, 19 nt, Artificial Sequence
  Synthetic
guacaaagaaauagggcuu

SEQ ID NO: 8192 - RNA, 19 nt, Artificial Sequence
  Synthetic
gaaacagaauugagagcau

SEQ ID NO: 8193 - RNA, 19 nt, Artificial Sequence
  Synthetic
ggaguauugcugugggaaa

SEQ ID NO: 8194 - RNA, 19 nt, Artificial Sequence
  Synthetic
uugcagaacuuguggaaaa

SEQ ID NO: 8195 - RNA, 19 nt, Artificial Sequence
  Synthetic
gaauguaacuccagauaga

SEQ ID NO: 8196 - RNA, 19 nt, Artificial Sequence
  Synthetic
gaacaaugcacuacaguau

SEQ ID NO: 8197 - RNA, 19 nt, Artificial Sequence
  Synthetic
gaacaaggcaagaaaccaa

SEQ ID NO: 8198 - RNA, 19 nt, Artificial Sequence
  Synthetic
ggugaagauuugugauuuu

SEQ ID NO: 8199 - RNA, 19 nt, Artificial Sequence
  Synthetic
aagaaauccuccagaagaa

SEQ ID NO: 8200 - RNA, 19 nt, Artificial Sequence
  Synthetic
caccauaccuccugcgaaa

SEQ ID NO: 8201 - RNA, 19 nt, Artificial Sequence
  Synthetic
ccucagaucacuugguuua

SEQ ID NO: 8202 - RNA, 19 nt, Artificial Sequence
  Synthetic
gggaagaaauccuccagaa

SEQ ID NO: 8203 - RNA, 19 nt, Artificial Sequence
  Synthetic
ccaaauggguuucauguua

SEQ ID NO: 8204 - RNA, 19 nt, Artificial Sequence
  Synthetic
gugaguaaggaaagcgaaa

SEQ ID NO: 8205 - RNA, 19 nt, Artificial Sequence
  Synthetic
cuaugaaagugaaggcauu

SEQ ID NO: 8206 - RNA, 19 nt, Artificial Sequence
  Synthetic
ggaagaaacauaagcuuuu

SEQ ID NO: 8207 - RNA, 19 nt, Artificial Sequence
  Synthetic
gggaagaaacauaagcuuu

SEQ ID NO: 8208 - RNA, 19 nt, Artificial Sequence
  Synthetic
acgcugagcuggaaaggaa

SEQ ID NO: 8209 - RNA, 19 nt, Artificial Sequence
  Synthetic
gaagaacacuacugcuaaa

SEQ ID NO: 8210 - RNA, 19 nt, Artificial Sequence
  Synthetic
ggaauauuacugugggaaa

SEQ ID NO: 8211 - RNA, 19 nt, Artificial Sequence
  Synthetic
aaacaugagugaagccaua

SEQ ID NO: 8212 - RNA, 19 nt, Artificial Sequence
  Synthetic
caagagaaguucagauaca

SEQ ID NO: 8213 - RNA, 19 nt, Artificial Sequence
  Synthetic
auagaaaggcuaacagaaa

SEQ ID NO: 8214 - RNA, 19 nt, Artificial Sequence
  Synthetic
gcugaauauaagaaggaaa

SEQ ID NO: 8215 - RNA, 19 nt, Artificial Sequence
  Synthetic
gaagauucguagaggaaca

SEQ ID NO: 8216 - RNA, 19 nt, Artificial Sequence
  Synthetic
ggaaagcuguaaagaagaa

SEQ ID NO: 8217 - RNA, 19 nt, Artificial Sequence
  Synthetic
uggaagaagaggaggacuu

SEQ ID NO: 8218 - RNA, 19 nt, Artificial Sequence
  Synthetic
ggacagagauuuucaagga

SEQ ID NO: 8219 - RNA, 19 nt, Artificial Sequence
  Synthetic
uggaagaaguguucagaca

SEQ ID NO: 8220 - RNA, 19 nt, Artificial Sequence
  Synthetic
ugaccaauaugaagaguuu

SEQ ID NO: 8221 - RNA, 19 nt, Artificial Sequence
  Synthetic
gaauauuacugugggaaau

SEQ ID NO: 8222 - RNA, 19 nt, Artificial Sequence
  Synthetic
ggaaaguggugaagauaug

SEQ ID NO: 8223 - RNA, 19 nt, Artificial Sequence
  Synthetic
cgcaacagcuuauggaauu

SEQ ID NO: 8224 - RNA, 19 nt, Artificial Sequence
  Synthetic
gcaccagccaggagaauau

SEQ ID NO: 8225 - RNA, 19 nt, Artificial Sequence
  Synthetic
ugucagaacucaagaugau

SEQ ID NO: 8226 - RNA, 19 nt, Artificial Sequence
  Synthetic
gggaaaguggugaagauau

SEQ ID NO: 8227 - RNA, 19 nt, Artificial Sequence
  Synthetic
ggacuuggacagagauuuu

SEQ ID NO: 8228 - RNA, 19 nt, Artificial Sequence
  Synthetic
ggaucaaaucucagggcuu

SEQ ID NO: 8229 - RNA, 19 nt, Artificial Sequence
  Synthetic
cagaagaagcgauguauca

SEQ ID NO: 8230 - RNA, 19 nt, Artificial Sequence
  Synthetic
gaucaggugcuuuuggaaa

SEQ ID NO: 8231 - RNA, 19 nt, Artificial Sequence
  Synthetic
caagaaacgacaccggaua

SEQ ID NO: 8232 - RNA, 19 nt, Artificial Sequence
  Synthetic
ggugaagauaugugacuuu

SEQ ID NO: 8233 - RNA, 19 nt, Artificial Sequence
  Synthetic
gcuuauggaauuagcaaaa

SEQ ID NO: 8234 - RNA, 19 nt, Artificial Sequence
  Synthetic
aggagaagcuaauaugauu

SEQ ID NO: 8235 - RNA, 19 nt, Artificial Sequence
  Synthetic
ggaagaaguguucagacaa

SEQ ID NO: 8236 - RNA, 19 nt, Artificial Sequence
  Synthetic
uaucaucaguggcaagaaa

SEQ ID NO: 8237 - RNA, 19 nt, Artificial Sequence
  Synthetic
agaagaaaguccagcuguu

SEQ ID NO: 8238 - RNA, 19 nt, Artificial Sequence
  Synthetic
gaauuuaagucguguguuc

SEQ ID NO: 8239 - RNA, 19 nt, Artificial Sequence
  Synthetic
acgggaaaguggugaagau

SEQ ID NO: 8240 - RNA, 19 nt, Artificial Sequence
  Synthetic
agaauaagacugugagcaa

SEQ ID NO: 8241 - RNA, 19 nt, Artificial Sequence
  Synthetic
ccgaguuuguggagggaaa

SEQ ID NO: 8242 - RNA, 19 nt, Artificial Sequence
  Synthetic
uggaaggcuccgaggauaa

SEQ ID NO: 8243 - RNA, 19 nt, Artificial Sequence
  Synthetic
ggaaagaauaagacuguga

SEQ ID NO: 8244 - RNA, 19 nt, Artificial Sequence
  Synthetic
gaugaagacauuugaggaa

SEQ ID NO: 8245 - RNA, 19 nt, Artificial Sequence
  Synthetic
gggcaggccuggauaauau

SEQ ID NO: 8246 - RNA, 19 nt, Artificial Sequence
  Synthetic
ggacaagaggagcaugaaa

SEQ ID NO: 8247 - RNA, 19 nt, Artificial Sequence
  Synthetic
cggaaagcgacguggugaa

SEQ ID NO: 8248 - RNA, 19 nt, Artificial Sequence
  Synthetic
gcaugaaaguggacaagga

SEQ ID NO: 8249 - RNA, 19 nt, Artificial Sequence
  Synthetic
cggaggaguuugagcagau

SEQ ID NO: 8250 - RNA, 19 nt, Artificial Sequence
  Synthetic
gagcaggcauagacaagaa

SEQ ID NO: 8251 - RNA, 19 nt, Artificial Sequence
  Synthetic
gcaacgagcucuaugacau

SEQ ID NO: 8252 - RNA, 19 nt, Artificial Sequence
  Synthetic
ugaagacauuugaggaauu

SEQ ID NO: 8253 - RNA, 19 nt, Artificial Sequence
  Synthetic
cagauagagagcaggcaua

SEQ ID NO: 8254 - RNA, 19 nt, Artificial Sequence
  Synthetic
guacaaggauggaaaggca

SEQ ID NO: 8255 - RNA, 19 nt, Artificial Sequence
  Synthetic
ggugaagaucugugacuuu

SEQ ID NO: 8256 - RNA, 19 nt, Artificial Sequence
  Synthetic
acaaaggcucuguggacaa

SEQ ID NO: 8257 - RNA, 19 nt, Artificial Sequence
  Synthetic
uggaagaucuugucugcua

SEQ ID NO: 8258 - RNA, 19 nt, Artificial Sequence
  Synthetic
ccuacguguucgugagaga

SEQ ID NO: 8259 - RNA, 19 nt, Artificial Sequence
  Synthetic
cugaaagcaucuucgacaa

SEQ ID NO: 8260 - RNA, 19 nt, Artificial Sequence
  Synthetic
ccgugugggcugaguuuaa

SEQ ID NO: 8261 - RNA, 19 nt, Artificial Sequence
  Synthetic
acacagaacucuccagcau

SEQ ID NO: 8262 - RNA, 19 nt, Artificial Sequence
  Synthetic
ccuccaggaugaagacauu

SEQ ID NO: 8263 - RNA, 19 nt, Artificial Sequence
  Synthetic
gccuggagcugguggugaa

SEQ ID NO: 8264 - RNA, 19 nt, Artificial Sequence
  Synthetic
gguacaaagacgagaggcu

SEQ ID NO: 8265 - RNA, 19 nt, Artificial Sequence
  Synthetic
gauaagggcagcauggaga

SEQ ID NO: 8266 - RNA, 19 nt, Artificial Sequence
  Synthetic
uuguggagggaaagaauaa

SEQ ID NO: 8267 - RNA, 19 nt, Artificial Sequence
  Synthetic
agagagagaaggcagcaua

SEQ ID NO: 8268 - RNA, 19 nt, Artificial Sequence
  Synthetic
gaggacaagaggagcauga

SEQ ID NO: 8269 - RNA, 19 nt, Artificial Sequence
  Synthetic
guggaaggcuccgaggaua

SEQ ID NO: 8270 - RNA, 19 nt, Artificial Sequence
  Synthetic
gggagaaguugaaggagga

SEQ ID NO: 8271 - RNA, 19 nt, Artificial Sequence
  Synthetic
aguugaaggaggaggagaa

SEQ ID NO: 8272 - RNA, 19 nt, Artificial Sequence
  Synthetic
gagcauuugaagaugaaga

SEQ ID NO: 8273 - RNA, 19 nt, Artificial Sequence
  Synthetic
ccuuugugauggagcauuu

SEQ ID NO: 8274 - RNA, 19 nt, Artificial Sequence
  Synthetic
aaccagaagcucagggaga

SEQ ID NO: 8275 - RNA, 19 nt, Artificial Sequence
  Synthetic
gaaacguggcugaggacga

SEQ ID NO: 8276 - RNA, 19 nt, Artificial Sequence
  Synthetic
auuugaagaugaagagcuu

SEQ ID NO: 8277 - RNA, 19 nt, Artificial Sequence
  Synthetic
ugaaugaguggcaggauga

SEQ ID NO: 8278 - RNA, 19 nt, Artificial Sequence
  Synthetic
ugauggagcauuugaagau

SEQ ID NO: 8279 - RNA, 19 nt, Artificial Sequence
  Synthetic
ggucccggcuacaggugaa

SEQ ID NO: 8280 - RNA, 19 nt, Artificial Sequence
  Synthetic
gagagcagauggcagauuu

SEQ ID NO: 8281 - RNA, 19 nt, Artificial Sequence
  Synthetic
agaaguugaaggaggagga

SEQ ID NO: 8282 - RNA, 19 nt, Artificial Sequence
  Synthetic
cgggaaacguggcugagga

SEQ ID NO: 8283 - RNA, 19 nt, Artificial Sequence
  Synthetic
augaagagcuugagcaguc

SEQ ID NO: 8284 - RNA, 19 nt, Artificial Sequence
  Synthetic
gugaaugaguggcaggaug

SEQ ID NO: 8285 - RNA, 19 nt, Artificial Sequence
  Synthetic
uugaagaugaagagcuuga

SEQ ID NO: 8286 - RNA, 19 nt, Artificial Sequence
  Synthetic
gaacacagugggccgaaga

SEQ ID NO: 8287 - RNA, 19 nt, Artificial Sequence
  Synthetic
ggucgggaaacguggcuga

SEQ ID NO: 8288 - RNA, 19 nt, Artificial Sequence
  Synthetic
caguguucgucaaagucaa

SEQ ID NO: 8289 - RNA, 19 nt, Artificial Sequence
  Synthetic
ugaaggaggaggagaacac

SEQ ID NO: 8290 - RNA, 19 nt, Artificial Sequence
  Synthetic
uggcaaucgccuugauguu

SEQ ID NO: 8291 - RNA, 19 nt, Artificial Sequence
  Synthetic
uggagcauuugaagaugaa

SEQ ID NO: 8292 - RNA, 19 nt, Artificial Sequence
  Synthetic
ucuaccagcuguuuaacua

SEQ ID NO: 8293 - RNA, 19 nt, Artificial Sequence
  Synthetic
gcccaguguucgucaaagu

SEQ ID NO: 8294 - RNA, 19 nt, Artificial Sequence
  Synthetic
accagaagcucagggagaa

SEQ ID NO: 8295 - RNA, 19 nt, Artificial Sequence
  Synthetic
gcagauggcagauuugcau

SEQ ID NO: 8296 - RNA, 19 nt, Artificial Sequence
  Synthetic
ugaccgagaggcacgagaa

SEQ ID NO: 8297 - RNA, 19 nt, Artificial Sequence
  Synthetic
ugcgaaggcugcucaagua

SEQ ID NO: 8298 - RNA, 19 nt, Artificial Sequence
  Synthetic
cucaguauguggacaaguu

SEQ ID NO: 8299 - RNA, 19 nt, Artificial Sequence
  Synthetic
ucagggagaaguugaagga

SEQ ID NO: 8300 - RNA, 19 nt, Artificial Sequence
  Synthetic
gaagaauguuugaagguga

SEQ ID NO: 8301 - RNA, 19 nt, Artificial Sequence
  Synthetic
cggaauaugagcuggcaau

SEQ ID NO: 8302 - RNA, 19 nt, Artificial Sequence
  Synthetic
cgacacggaucaaggacga

SEQ ID NO: 8303 - RNA, 19 nt, Artificial Sequence
  Synthetic
uggacaugguggagaagga

SEQ ID NO: 8304 - RNA, 19 nt, Artificial Sequence
  Synthetic
ggaauaugagcuggcaaua

SEQ ID NO: 8305 - RNA, 19 nt, Artificial Sequence
  Synthetic
guggaaacguagcagagga

SEQ ID NO: 8306 - RNA, 19 nt, Artificial Sequence
  Synthetic
ugauggagcacauggacau

SEQ ID NO: 8307 - RNA, 19 nt, Artificial Sequence
  Synthetic
uggaaacguagcagaggau

SEQ ID NO: 8308 - RNA, 19 nt, Artificial Sequence
  Synthetic
gagaagaaauggaagaaau

SEQ ID NO: 8309 - RNA, 19 nt, Artificial Sequence
  Synthetic
gcagaauugucaagggaua

SEQ ID NO: 8310 - RNA, 19 nt, Artificial Sequence
  Synthetic
gugcugaaaugcaggaaua

SEQ ID NO: 8311 - RNA, 19 nt, Artificial Sequence
  Synthetic
cagaaauguuugcaagaua

SEQ ID NO: 8312 - RNA, 19 nt, Artificial Sequence
  Synthetic
cauaagaggcagaaggcaa

SEQ ID NO: 8313 - RNA, 19 nt, Artificial Sequence
  Synthetic
gcaaagaucucaugggcuu

SEQ ID NO: 8314 - RNA, 19 nt, Artificial Sequence
  Synthetic
ccaaagugcugcaguacua

SEQ ID NO: 8315 - RNA, 19 nt, Artificial Sequence
  Synthetic
ccaaggagcuccagcacua

SEQ ID NO: 8316 - RNA, 19 nt, Artificial Sequence
  Synthetic
gggacagcauggaagaaua

SEQ ID NO: 8317 - RNA, 19 nt, Artificial Sequence
  Synthetic
ggccuauggucgagauuua

SEQ ID NO: 8318 - RNA, 19 nt, Artificial Sequence
  Synthetic
ggucugaguuuaaggucua

SEQ ID NO: 8319 - RNA, 19 nt, Artificial Sequence
  Synthetic
ggaaauggguugaugaacu

SEQ ID NO: 8320 - RNA, 19 nt, Artificial Sequence
  Synthetic
gggaagaaguaccaaauuu

SEQ ID NO: 8321 - RNA, 19 nt, Artificial Sequence
  Synthetic
gagacuugauggaggagaa

SEQ ID NO: 8322 - RNA, 19 nt, Artificial Sequence
  Synthetic
gcacaaaguauaaagugua

SEQ ID NO: 8323 - RNA, 19 nt, Artificial Sequence
  Synthetic
gcgccaaccuggaugacua

SEQ ID NO: 8324 - RNA, 19 nt, Artificial Sequence
  Synthetic
guacaugaaaucagggaau

SEQ ID NO: 8325 - RNA, 19 nt, Artificial Sequence
  Synthetic
ggacauucaagaugggcua

SEQ ID NO: 8326 - RNA, 19 nt, Artificial Sequence
  Synthetic
ggucugaacugaaugaaga

SEQ ID NO: 8327 - RNA, 19 nt, Artificial Sequence
  Synthetic
acacaaauaccaaaggcaa

SEQ ID NO: 8328 - RNA, 19 nt, Artificial Sequence
  Synthetic
gcacagugggauuggaaga

SEQ ID NO: 8329 - RNA, 19 nt, Artificial Sequence
  Synthetic
gugaaaugcuggucaacau

SEQ ID NO: 8330 - RNA, 19 nt, Artificial Sequence
  Synthetic
gggacuacagggagaagaa

SEQ ID NO: 8331 - RNA, 19 nt, Artificial Sequence
  Synthetic
cgagagaaguuuccagaga

SEQ ID NO: 8332 - RNA, 19 nt, Artificial Sequence
  Synthetic
ggugaaagccauccagauu

SEQ ID NO: 8333 - RNA, 19 nt, Artificial Sequence
  Synthetic
ccgcugaguacguggaauu

SEQ ID NO: 8334 - RNA, 19 nt, Artificial Sequence
  Synthetic
ccacguaaaucaagccauu

SEQ ID NO: 8335 - RNA, 19 nt, Artificial Sequence
  Synthetic
aaacaggacccaugaagaa

SEQ ID NO: 8336 - RNA, 19 nt, Artificial Sequence
  Synthetic
gcuauguaguagagcccua

SEQ ID NO: 8337 - RNA, 19 nt, Artificial Sequence
  Synthetic
cagaagauccauaacuuua

SEQ ID NO: 8338 - RNA, 19 nt, Artificial Sequence
  Synthetic
caaacuggguggagaucua

SEQ ID NO: 8339 - RNA, 19 nt, Artificial Sequence
  Synthetic
ugaaagacuagcagaggaa

SEQ ID NO: 8340 - RNA, 19 nt, Artificial Sequence
  Synthetic
cauacacguuugaggacua

SEQ ID NO: 8341 - RNA, 19 nt, Artificial Sequence
  Synthetic
gaaccuaugugaucaacaa

SEQ ID NO: 8342 - RNA, 19 nt, Artificial Sequence
  Synthetic
gaugagaccaccuaugaaa

SEQ ID NO: 8343 - RNA, 19 nt, Artificial Sequence
  Synthetic
uugaagaccuugcagacaa

SEQ ID NO: 8344 - RNA, 19 nt, Artificial Sequence
  Synthetic
ugggcagaguacagauuua

SEQ ID NO: 8345 - RNA, 19 nt, Artificial Sequence
  Synthetic
ccaguggaccuaagcguua

SEQ ID NO: 8346 - RNA, 19 nt, Artificial Sequence
  Synthetic
ucaacaagcagacgccaaa

SEQ ID NO: 8347 - RNA, 19 nt, Artificial Sequence
  Synthetic
cguuaugacuggacuggga

SEQ ID NO: 8348 - RNA, 19 nt, Artificial Sequence
  Synthetic
ugucaaacuggguggagau

SEQ ID NO: 8349 - RNA, 19 nt, Artificial Sequence
  Synthetic
cuuugggaguggugucuua

SEQ ID NO: 8350 - RNA, 19 nt, Artificial Sequence
  Synthetic
aggaaacgcuggacucuuu

SEQ ID NO: 8351 - RNA, 19 nt, Artificial Sequence
  Synthetic
aagcaaaucuggcuaucuu

SEQ ID NO: 8352 - RNA, 19 nt, Artificial Sequence
  Synthetic
ggucacacagcuaggaagu

SEQ ID NO: 8353 - RNA, 19 nt, Artificial Sequence
  Synthetic
ggguggagaucuaggaacc

SEQ ID NO: 8354 - RNA, 19 nt, Artificial Sequence
  Synthetic
augaaagacuagcagagga

SEQ ID NO: 8355 - RNA, 19 nt, Artificial Sequence
  Synthetic
ggaccuaagcguuaugacu

SEQ ID NO: 8356 - RNA, 19 nt, Artificial Sequence
  Synthetic
cagacaagccauacacguu

SEQ ID NO: 8357 - RNA, 19 nt, Artificial Sequence
  Synthetic
cagagugucuauuugauga

SEQ ID NO: 8358 - RNA, 19 nt, Artificial Sequence
  Synthetic
gaggaaaucuggaacuuug

SEQ ID NO: 8359 - RNA, 19 nt, Artificial Sequence
  Synthetic
agagcucacuaaagccuua

SEQ ID NO: 8360 - RNA, 19 nt, Artificial Sequence
  Synthetic
ggacuaugaugucuccuuu

SEQ ID NO: 8361 - RNA, 19 nt, Artificial Sequence
  Synthetic
accacaauccuaugaagua

SEQ ID NO: 8362 - RNA, 19 nt, Artificial Sequence
  Synthetic
agacaagccauacacguuu

SEQ ID NO: 8363 - RNA, 19 nt, Artificial Sequence
  Synthetic
ggaagugggcagaguacag

SEQ ID NO: 8364 - RNA, 19 nt, Artificial Sequence
  Synthetic
gcuaggaagugggcagagu

SEQ ID NO: 8365 - RNA, 19 nt, Artificial Sequence
  Synthetic
cggccaagcagccucaauu

SEQ ID NO: 8366 - RNA, 19 nt, Artificial Sequence
  Synthetic
ucuuaugccuauaccugaa

SEQ ID NO: 8367 - RNA, 19 nt, Artificial Sequence
  Synthetic
gaguacagauuuacacuag

SEQ ID NO: 8368 - RNA, 19 nt, Artificial Sequence
  Synthetic
ccauaaagucugagaaaua

SEQ ID NO: 8369 - RNA, 19 nt, Artificial Sequence
  Synthetic
gaucagaugcagagaaaca

SEQ ID NO: 8370 - RNA, 19 nt, Artificial Sequence
  Synthetic
gaugaacacuggagaagaa

SEQ ID NO: 8371 - RNA, 19 nt, Artificial Sequence
  Synthetic
ggacagucaaggugauaua

SEQ ID NO: 8372 - RNA, 19 nt, Artificial Sequence
  Synthetic
ggauaaaguuggccaugua

SEQ ID NO: 8373 - RNA, 19 nt, Artificial Sequence
  Synthetic
ugaugcagcuguugagaaa

SEQ ID NO: 8374 - RNA, 19 nt, Artificial Sequence
  Synthetic
agaaggaaaugauggaauu

SEQ ID NO: 8375 - RNA, 19 nt, Artificial Sequence
  Synthetic
gcccauaaagucugagaaa

SEQ ID NO: 8376 - RNA, 19 nt, Artificial Sequence
  Synthetic
aaauaaagcugccggugaa

SEQ ID NO: 8377 - RNA, 19 nt, Artificial Sequence
  Synthetic
aagaucagaugcagagaaa

SEQ ID NO: 8378 - RNA, 19 nt, Artificial Sequence
  Synthetic
ggccuagacuucugaguaa

SEQ ID NO: 8379 - RNA, 19 nt, Artificial Sequence
  Synthetic
guuggaaacuugaagacua

SEQ ID NO: 8380 - RNA, 19 nt, Artificial Sequence
  Synthetic
uuacagaguugaugagaca

SEQ ID NO: 8381 - RNA, 19 nt, Artificial Sequence
  Synthetic
cagagaaagugaaagccaa

SEQ ID NO: 8382 - RNA, 19 nt, Artificial Sequence
  Synthetic
aggcacagauaaugaagaa

SEQ ID NO: 8383 - RNA, 19 nt, Artificial Sequence
  Synthetic
agagaaagugaaagccaaa

SEQ ID NO: 8384 - RNA, 19 nt, Artificial Sequence
  Synthetic
cagucaaggugauauauaa

SEQ ID NO: 8385 - RNA, 19 nt, Artificial Sequence
  Synthetic
ggaacuacauucacagaga

SEQ ID NO: 8386 - RNA, 19 nt, Artificial Sequence
  Synthetic
guaacuacaaugaugguaa

SEQ ID NO: 8387 - RNA, 19 nt, Artificial Sequence
  Synthetic
ccauuugauuugucguaua

SEQ ID NO: 8388 - RNA, 19 nt, Artificial Sequence
  Synthetic
cuuccgagcaggugacaaa

SEQ ID NO: 8389 - RNA, 19 nt, Artificial Sequence
  Synthetic
gggaguaccuagaacccua

SEQ ID NO: 8390 - RNA, 19 nt, Artificial Sequence
  Synthetic
gaacacuggagaagaauau

SEQ ID NO: 8391 - RNA, 19 nt, Artificial Sequence
  Synthetic
ccuaagacauccaaagcuu

SEQ ID NO: 8392 - RNA, 19 nt, Artificial Sequence
  Synthetic
gaaacagacucuucauauu

SEQ ID NO: 8393 - RNA, 19 nt, Artificial Sequence
  Synthetic
gggaaggucuguggaacaa

SEQ ID NO: 8394 - RNA, 19 nt, Artificial Sequence
  Synthetic
cuucauauucagaugcaaa

SEQ ID NO: 8395 - RNA, 19 nt, Artificial Sequence
  Synthetic
gaaauaaagcugccgguga

SEQ ID NO: 8396 - RNA, 19 nt, Artificial Sequence
  Synthetic
gcuggaaugcagagccuaa

SEQ ID NO: 8397 - RNA, 19 nt, Artificial Sequence
  Synthetic
ggaccugugcuuugagauu

SEQ ID NO: 8398 - RNA, 19 nt, Artificial Sequence
  Synthetic
gcuuagaguuguagacuua

SEQ ID NO: 8399 - RNA, 19 nt, Artificial Sequence
  Synthetic
augcagauguagcggguua

SEQ ID NO: 8400 - RNA, 19 nt, Artificial Sequence
  Synthetic
gcacugaggcagagauuca

SEQ ID NO: 8401 - RNA, 19 nt, Artificial Sequence
  Synthetic
gagaaaaccuggagcuaca

SEQ ID NO: 8402 - RNA, 19 nt, Artificial Sequence
  Synthetic
gcacaugggucgagacuuc

SEQ ID NO: 8403 - RNA, 19 nt, Artificial Sequence
  Synthetic
gagagggacaaguggcuaa

SEQ ID NO: 8404 - RNA, 19 nt, Artificial Sequence
  Synthetic
cacugaagguggagguaga

SEQ ID NO: 8405 - RNA, 19 nt, Artificial Sequence
  Synthetic
ccaaggagccacagcaaaa

SEQ ID NO: 8406 - RNA, 19 nt, Artificial Sequence
  Synthetic
ggacaggggccuagaugua

SEQ ID NO: 8407 - RNA, 19 nt, Artificial Sequence
  Synthetic
cguacugggagcagaagaa

SEQ ID NO: 8408 - RNA, 19 nt, Artificial Sequence
  Synthetic
gcucauggcuccaggcugu

SEQ ID NO: 8409 - RNA, 19 nt, Artificial Sequence
  Synthetic
aggcauucccuauggcuua

SEQ ID NO: 8410 - RNA, 19 nt, Artificial Sequence
  Synthetic
gggcacugaggcagagauu

SEQ ID NO: 8411 - RNA, 19 nt, Artificial Sequence
  Synthetic
cggccuacgcucagaauca

SEQ ID NO: 8412 - RNA, 19 nt, Artificial Sequence
  Synthetic
ccacaagggcccuggaaag

SEQ ID NO: 8413 - RNA, 19 nt, Artificial Sequence
  Synthetic
ggaguugauuggacaguca

SEQ ID NO: 8414 - RNA, 19 nt, Artificial Sequence
  Synthetic
gcaaggcgaugcagaugua

SEQ ID NO: 8415 - RNA, 19 nt, Artificial Sequence
  Synthetic
ugagaugacugugaagaua

SEQ ID NO: 8416 - RNA, 19 nt, Artificial Sequence
  Synthetic
ccgagggccuugggaauua

SEQ ID NO: 8417 - RNA, 19 nt, Artificial Sequence
  Synthetic
gaccgagggccuugggaau

SEQ ID NO: 8418 - RNA, 19 nt, Artificial Sequence
  Synthetic
gaagcugaccagagcaaga

SEQ ID NO: 8419 - RNA, 19 nt, Artificial Sequence
  Synthetic
gcacggaagcccugaucca

SEQ ID NO: 8420 - RNA, 19 nt, Artificial Sequence
  Synthetic
cgucuggacagcugggaga

SEQ ID NO: 8421 - RNA, 19 nt, Artificial Sequence
  Synthetic
ccucguacugggagcagaa

SEQ ID NO: 8422 - RNA, 19 nt, Artificial Sequence
  Synthetic
ggcagaagcgggagcagau

SEQ ID NO: 8423 - RNA, 19 nt, Artificial Sequence
  Synthetic
gcagugacccagugauuca

SEQ ID NO: 8424 - RNA, 19 nt, Artificial Sequence
  Synthetic
ucacggugccugagggcuu

SEQ ID NO: 8425 - RNA, 19 nt, Artificial Sequence
  Synthetic
uagcagugacccagugauu

SEQ ID NO: 8426 - RNA, 19 nt, Artificial Sequence
  Synthetic
cugcgaaucugcucccaaa

SEQ ID NO: 8427 - RNA, 19 nt, Artificial Sequence
  Synthetic
ccacguggccuuuacaaau

SEQ ID NO: 8428 - RNA, 19 nt, Artificial Sequence
  Synthetic
gaguggaaguggagggaua

SEQ ID NO: 8429 - RNA, 19 nt, Artificial Sequence
  Synthetic
gaacagaaagagaaagaaa

SEQ ID NO: 8430 - RNA, 19 nt, Artificial Sequence
  Synthetic
cagaaaugaagaagggaaa

SEQ ID NO: 8431 - RNA, 19 nt, Artificial Sequence
  Synthetic
ccaaagaaagagagaagaa

SEQ ID NO: 8432 - RNA, 19 nt, Artificial Sequence
  Synthetic
ccagagaucuacagguaaa

SEQ ID NO: 8433 - RNA, 19 nt, Artificial Sequence
  Synthetic
ggacaaugauggagagauc

SEQ ID NO: 8434 - RNA, 19 nt, Artificial Sequence
  Synthetic
ugucaaaggaggaaagaau

SEQ ID NO: 8435 - RNA, 19 nt, Artificial Sequence
  Synthetic
cagacaacccagaaggaaa

SEQ ID NO: 8436 - RNA, 19 nt, Artificial Sequence
  Synthetic
gggaaaaggaagaaaagaa

SEQ ID NO: 8437 - RNA, 19 nt, Artificial Sequence
  Synthetic
gcagaaaugaagaagggaa

SEQ ID NO: 8438 - RNA, 19 nt, Artificial Sequence
  Synthetic
gaaaugaagaagggaaaua

SEQ ID NO: 8439 - RNA, 19 nt, Artificial Sequence
  Synthetic
ggaguuaccuagcggacaa

SEQ ID NO: 8440 - RNA, 19 nt, Artificial Sequence
  Synthetic
ggaacaagacagugaagga

SEQ ID NO: 8441 - RNA, 19 nt, Artificial Sequence
  Synthetic
agagagaagaaaagggaaa

SEQ ID NO: 8442 - RNA, 19 nt, Artificial Sequence
  Synthetic
gggaagacucagaaaauaa

SEQ ID NO: 8443 - RNA, 19 nt, Artificial Sequence
  Synthetic
ggacaugggagaugaaguu

SEQ ID NO: 8444 - RNA, 19 nt, Artificial Sequence
  Synthetic
gagaugaaguuuacgauga

SEQ ID NO: 8445 - RNA, 19 nt, Artificial Sequence
  Synthetic
agacagugaaggagaaaca

SEQ ID NO: 8446 - RNA, 19 nt, Artificial Sequence
  Synthetic
aggaacagaaagagaaaga

SEQ ID NO: 8447 - RNA, 19 nt, Artificial Sequence
  Synthetic
cuucaagcaaggagagcaa

SEQ ID NO: 8448 - RNA, 19 nt, Artificial Sequence
  Synthetic
aggaaaaggaaaagggaga

SEQ ID NO: 8449 - RNA, 19 nt, Artificial Sequence
  Synthetic
aaacucaucuucaggaaua

SEQ ID NO: 8450 - RNA, 19 nt, Artificial Sequence
  Synthetic
ugacauuuaugaugggauu

SEQ ID NO: 8451 - RNA, 19 nt, Artificial Sequence
  Synthetic
gguaaaaccuggugaaucu

SEQ ID NO: 8452 - RNA, 19 nt, Artificial Sequence
  Synthetic
caggaauacaagcaagaaa

SEQ ID NO: 8453 - RNA, 19 nt, Artificial Sequence
  Synthetic
auagaagcauccaaagaaa

SEQ ID NO: 8454 - RNA, 19 nt, Artificial Sequence
  Synthetic
aaaccaagaccaugacuua

SEQ ID NO: 8455 - RNA, 19 nt, Artificial Sequence
  Synthetic
acaagacagugaaggagaa

SEQ ID NO: 8456 - RNA, 19 nt, Artificial Sequence
  Synthetic
agacauagaagcauccaaa

SEQ ID NO: 8457 - RNA, 19 nt, Artificial Sequence
  Synthetic
aaaggaacagaaagagaaa

SEQ ID NO: 8458 - RNA, 19 nt, Artificial Sequence
  Synthetic
gauaaugggcugugugcaa

SEQ ID NO: 8459 - RNA, 19 nt, Artificial Sequence
  Synthetic
ccaaagaugucugggaaau

SEQ ID NO: 8460 - RNA, 19 nt, Artificial Sequence
  Synthetic
ggauaaagaagcaacaaaa

SEQ ID NO: 8461 - RNA, 19 nt, Artificial Sequence
  Synthetic
gcugaugguuuguguuuua

SEQ ID NO: 8462 - RNA, 19 nt, Artificial Sequence
  Synthetic
cagagaaagcugaugguuu

SEQ ID NO: 8463 - RNA, 19 nt, Artificial Sequence
  Synthetic
aggaagagcucugaaauua

SEQ ID NO: 8464 - RNA, 19 nt, Artificial Sequence
  Synthetic
acacaaaaguagccauaaa

SEQ ID NO: 8465 - RNA, 19 nt, Artificial Sequence
  Synthetic
gaaaggagaccaugucaaa

SEQ ID NO: 8466 - RNA, 19 nt, Artificial Sequence
  Synthetic
cagaagaugaccugaguuu

SEQ ID NO: 8467 - RNA, 19 nt, Artificial Sequence
  Synthetic
cuugacaacuggagagaca

SEQ ID NO: 8468 - RNA, 19 nt, Artificial Sequence
  Synthetic
cgugaagggaauuuagaua

SEQ ID NO: 8469 - RNA, 19 nt, Artificial Sequence
  Synthetic
ccaaaggaagagugccaua

SEQ ID NO: 8470 - RNA, 19 nt, Artificial Sequence
  Synthetic
cguugugucuggagaagaa

SEQ ID NO: 8471 - RNA, 19 nt, Artificial Sequence
  Synthetic
gaguauaugaacaaaggaa

SEQ ID NO: 8472 - RNA, 19 nt, Artificial Sequence
  Synthetic
cuuaaaagauggagaagga

SEQ ID NO: 8473 - RNA, 19 nt, Artificial Sequence
  Synthetic
gugaagggaauuuagauaa

SEQ ID NO: 8474 - RNA, 19 nt, Artificial Sequence
  Synthetic
ugaagaagcugaagcacga

SEQ ID NO: 8475 - RNA, 19 nt, Artificial Sequence
  Synthetic
guagaagacauguggugua

SEQ ID NO: 8476 - RNA, 19 nt, Artificial Sequence
  Synthetic
cggauuggcccgauugaua

SEQ ID NO: 8477 - RNA, 19 nt, Artificial Sequence
  Synthetic
ccgaaaagaugcugagcga

SEQ ID NO: 8478 - RNA, 19 nt, Artificial Sequence
  Synthetic
gggaugauaugaaaggaga

SEQ ID NO: 8479 - RNA, 19 nt, Artificial Sequence
  Synthetic
ggaauggacucauaugcaa

SEQ ID NO: 8480 - RNA, 19 nt, Artificial Sequence
  Synthetic
aggauaaagaagcaacaaa

SEQ ID NO: 8481 - RNA, 19 nt, Artificial Sequence
  Synthetic
gugaagcauucgagacaga

SEQ ID NO: 8482 - RNA, 19 nt, Artificial Sequence
  Synthetic
gaagacaugugguguauau

SEQ ID NO: 8483 - RNA, 19 nt, Artificial Sequence
  Synthetic
gacaaugaguacacagcaa

SEQ ID NO: 8484 - RNA, 19 nt, Artificial Sequence
  Synthetic
ugauagaagacaaugagua

SEQ ID NO: 8485 - RNA, 19 nt, Artificial Sequence
  Synthetic
gaaaagaugcugagcgaca

SEQ ID NO: 8486 - RNA, 19 nt, Artificial Sequence
  Synthetic
uggaaaacuuggccgaaaa

SEQ ID NO: 8487 - RNA, 19 nt, Artificial Sequence
  Synthetic
acaucgagcgcaugaauua

SEQ ID NO: 8488 - RNA, 19 nt, Artificial Sequence
  Synthetic
gaagagaucacgaggaaua

SEQ ID NO: 8489 - RNA, 19 nt, Artificial Sequence
  Synthetic
aggaagagaucacgaggaa

SEQ ID NO: 8490 - RNA, 19 nt, Artificial Sequence
  Synthetic
guugagaacuuguugcuua

SEQ ID NO: 8491 - RNA, 19 nt, Artificial Sequence
  Synthetic
ugggagaacucgagcauga

SEQ ID NO: 8492 - RNA, 19 nt, Artificial Sequence
  Synthetic
ggucggaguuugagaacca

SEQ ID NO: 8493 - RNA, 19 nt, Artificial Sequence
  Synthetic
aggaagagaaggaggcaga

SEQ ID NO: 8494 - RNA, 19 nt, Artificial Sequence
  Synthetic
uggacuggauugagggcaa

SEQ ID NO: 8495 - RNA, 19 nt, Artificial Sequence
  Synthetic
gcgccaugcugcaggugaa

SEQ ID NO: 8496 - RNA, 19 nt, Artificial Sequence
  Synthetic
ccaggcacaugaagagaaa

SEQ ID NO: 8497 - RNA, 19 nt, Artificial Sequence
  Synthetic
uggcagagaguaugcauua

SEQ ID NO: 8498 - RNA, 19 nt, Artificial Sequence
  Synthetic
uuuugaggauggagcgaaa

SEQ ID NO: 8499 - RNA, 19 nt, Artificial Sequence
  Synthetic
ggcagagacuggugcagaa

SEQ ID NO: 8500 - RNA, 19 nt, Artificial Sequence
  Synthetic
gcacacagcuccacagguu

SEQ ID NO: 8501 - RNA, 19 nt, Artificial Sequence
  Synthetic
cgaaggaggguuugcauuu

SEQ ID NO: 8502 - RNA, 19 nt, Artificial Sequence
  Synthetic
guauagaacaccagaaauc

SEQ ID NO: 8503 - RNA, 19 nt, Artificial Sequence
  Synthetic
agaacuuguugcuuaguaa

SEQ ID NO: 8504 - RNA, 19 nt, Artificial Sequence
  Synthetic
aggacagagacgagaguga

SEQ ID NO: 8505 - RNA, 19 nt, Artificial Sequence
  Synthetic
cuaauuaugcaaaggguga

SEQ ID NO: 8506 - RNA, 19 nt, Artificial Sequence
  Synthetic
gcagagaguaugcauuaaa

SEQ ID NO: 8507 - RNA, 19 nt, Artificial Sequence
  Synthetic
ggggaguggcagagaguau

SEQ ID NO: 8508 - RNA, 19 nt, Artificial Sequence
  Synthetic
cgaaggaacagcugauuca

SEQ ID NO: 8509 - RNA, 19 nt, Artificial Sequence
  Synthetic
gaacagagccaucauucaa

SEQ ID NO: 8510 - RNA, 19 nt, Artificial Sequence
  Synthetic
gagcccugguggaggaaga

SEQ ID NO: 8511 - RNA, 19 nt, Artificial Sequence
  Synthetic
agaaagggccaaagaccau

SEQ ID NO: 8512 - RNA, 19 nt, Artificial Sequence
  Synthetic
auguauagaacaccagaaa

SEQ ID NO: 8513 - RNA, 19 nt, Artificial Sequence
  Synthetic
gcgugugacauucaagaaa

SEQ ID NO: 8514 - RNA, 19 nt, Artificial Sequence
  Synthetic
uaagauugaagauggcaaa

SEQ ID NO: 8515 - RNA, 19 nt, Artificial Sequence
  Synthetic
gcauuaaagaggcuauuau

SEQ ID NO: 8516 - RNA, 19 nt, Artificial Sequence
  Synthetic
ggaaaagaggagucagaca

SEQ ID NO: 8517 - RNA, 19 nt, Artificial Sequence
  Synthetic
gggaggagcagcaagacau

SEQ ID NO: 8518 - RNA, 19 nt, Artificial Sequence
  Synthetic
gguacaacuggaagagcua

SEQ ID NO: 8519 - RNA, 19 nt, Artificial Sequence
  Synthetic
ccaacuaugucaagggagu

SEQ ID NO: 8520 - RNA, 19 nt, Artificial Sequence
  Synthetic
gagccaaggugcugugcuu

SEQ ID NO: 8521 - RNA, 19 nt, Artificial Sequence
  Synthetic
agggagugauucaguacua

SEQ ID NO: 8522 - RNA, 19 nt, Artificial Sequence
  Synthetic
gggagguacaacuggaaga

SEQ ID NO: 8523 - RNA, 19 nt, Artificial Sequence
  Synthetic
cgucauggcugcuuugaga

SEQ ID NO: 8524 - RNA, 19 nt, Artificial Sequence
  Synthetic
gggaacacacggacuacaa

SEQ ID NO: 8525 - RNA, 19 nt, Artificial Sequence
  Synthetic
gccucaugguggagagcca

SEQ ID NO: 8526 - RNA, 19 nt, Artificial Sequence
  Synthetic
uggaagagcuagaggcugc

SEQ ID NO: 8527 - RNA, 19 nt, Artificial Sequence
  Synthetic
ccuuggaaguggccacgua

SEQ ID NO: 8528 - RNA, 19 nt, Artificial Sequence
  Synthetic
ggcacauccaggagcacua

SEQ ID NO: 8529 - RNA, 19 nt, Artificial Sequence
  Synthetic
gcgccaaugugaagaagug

SEQ ID NO: 8530 - RNA, 19 nt, Artificial Sequence
  Synthetic
gcucagcauccuuggaagu

SEQ ID NO: 8531 - RNA, 19 nt, Artificial Sequence
  Synthetic
ucaagggagugauucagua

SEQ ID NO: 8532 - RNA, 19 nt, Artificial Sequence
  Synthetic
ccugagacguggcgacuac

SEQ ID NO: 8533 - RNA, 19 nt, Artificial Sequence
  Synthetic
guuuauggcagccgcauga

SEQ ID NO: 8534 - RNA, 19 nt, Artificial Sequence
  Synthetic
aggaugggcuggugucucu

SEQ ID NO: 8535 - RNA, 19 nt, Artificial Sequence
  Synthetic
auauccgggugcucaauaa

SEQ ID NO: 8536 - RNA, 19 nt, Artificial Sequence
  Synthetic
gaccaguucaucucacuua

SEQ ID NO: 8537 - RNA, 19 nt, Artificial Sequence
  Synthetic
gcucaucaccaacucuaau

SEQ ID NO: 8538 - RNA, 19 nt, Artificial Sequence
  Synthetic
gagacguggcgacuacaga

SEQ ID NO: 8539 - RNA, 19 nt, Artificial Sequence
  Synthetic
gugcucaucaccaacucua

SEQ ID NO: 8540 - RNA, 19 nt, Artificial Sequence
  Synthetic
cagcucagcauccuuggaa

SEQ ID NO: 8541 - RNA, 19 nt, Artificial Sequence
  Synthetic
cauauccgggugcucaaua

SEQ ID NO: 8542 - RNA, 19 nt, Artificial Sequence
  Synthetic
ccggugccaucuuccauau

SEQ ID NO: 8543 - RNA, 19 nt, Artificial Sequence
  Synthetic
gccacgcgcugcucauuga

SEQ ID NO: 8544 - RNA, 19 nt, Artificial Sequence
  Synthetic
aaacuugugccuccaaugu

SEQ ID NO: 8545 - RNA, 19 nt, Artificial Sequence
  Synthetic
gggagugauucaguacuac

SEQ ID NO: 8546 - RNA, 19 nt, Artificial Sequence
  Synthetic
ucacuuaugggacagaaag

SEQ ID NO: 8547 - RNA, 19 nt, Artificial Sequence
  Synthetic
ggaacacacggacuacaac

SEQ ID NO: 8548 - RNA, 19 nt, Artificial Sequence
  Synthetic
caacauaauaggagagcau

SEQ ID NO: 8549 - RNA, 19 nt, Artificial Sequence
  Synthetic
gcucaagggucacgacuua

SEQ ID NO: 8550 - RNA, 19 nt, Artificial Sequence
  Synthetic
cugcgaagcuccuggcuaa

SEQ ID NO: 8551 - RNA, 19 nt, Artificial Sequence
  Synthetic
uggaggaggugcaggcuaa

SEQ ID NO: 8552 - RNA, 19 nt, Artificial Sequence
  Synthetic
agggauuagucuagaagaa

SEQ ID NO: 8553 - RNA, 19 nt, Artificial Sequence
  Synthetic
ggauuagucuagaagaaau

SEQ ID NO: 8554 - RNA, 19 nt, Artificial Sequence
  Synthetic
gugccaagagugagcguua

SEQ ID NO: 8555 - RNA, 19 nt, Artificial Sequence
  Synthetic
gaagauaugugaagaagca

SEQ ID NO: 8556 - RNA, 19 nt, Artificial Sequence
  Synthetic
gaggagugauggaagcuua

SEQ ID NO: 8557 - RNA, 19 nt, Artificial Sequence
  Synthetic
cgaaauauggcuacagaga

SEQ ID NO: 8558 - RNA, 19 nt, Artificial Sequence
  Synthetic
cuaauaacauccagauuga

SEQ ID NO: 8559 - RNA, 19 nt, Artificial Sequence
  Synthetic
ccuauaacccugaggagau

SEQ ID NO: 8560 - RNA, 19 nt, Artificial Sequence
  Synthetic
gggaauuagccuggaggaa

SEQ ID NO: 8561 - RNA, 19 nt, Artificial Sequence
  Synthetic
acuuaaaggaauucaggaa

SEQ ID NO: 8562 - RNA, 19 nt, Artificial Sequence
  Synthetic
acauaauaggagagcauau

SEQ ID NO: 8563 - RNA, 19 nt, Artificial Sequence
  Synthetic
gaauuagccuggaggaacu

SEQ ID NO: 8564 - RNA, 19 nt, Artificial Sequence
  Synthetic
ggcagaacauccuagguua

SEQ ID NO: 8565 - RNA, 19 nt, Artificial Sequence
  Synthetic
uccuauggcuguagaacaa

SEQ ID NO: 8566 - RNA, 19 nt, Artificial Sequence
  Synthetic
uuaaaggaauucaggaaca

SEQ ID NO: 8567 - RNA, 19 nt, Artificial Sequence
  Synthetic
cuucaguacuagugcuaau

SEQ ID NO: 8568 - RNA, 19 nt, Artificial Sequence
  Synthetic
gaagaaaugcuguugguca

SEQ ID NO: 8569 - RNA, 19 nt, Artificial Sequence
  Synthetic
caggaagagucaacauaau

SEQ ID NO: 8570 - RNA, 19 nt, Artificial Sequence
  Synthetic
gcuccuggcuaaauacaaa

SEQ ID NO: 8571 - RNA, 19 nt, Artificial Sequence
  Synthetic
gggauuagucuagaagaaa

SEQ ID NO: 8572 - RNA, 19 nt, Artificial Sequence
  Synthetic
cuagguuacugaagcuaaa

SEQ ID NO: 8573 - RNA, 19 nt, Artificial Sequence
  Synthetic
uaggagagcauauagauua

SEQ ID NO: 8574 - RNA, 19 nt, Artificial Sequence
  Synthetic
aggaagagucaacauaaua

SEQ ID NO: 8575 - RNA, 19 nt, Artificial Sequence
  Synthetic
cugccaaguugauagaauu

SEQ ID NO: 8576 - RNA, 19 nt, Artificial Sequence
  Synthetic
gggacaaaguacugaggcu

SEQ ID NO: 8577 - RNA, 19 nt, Artificial Sequence
  Synthetic
gcauauagauuauugugga

SEQ ID NO: 8578 - RNA, 19 nt, Artificial Sequence
  Synthetic
ggaauaagaaagagagaga

SEQ ID NO: 8579 - RNA, 19 nt, Artificial Sequence
  Synthetic
agaaagagagagaaggaaa

SEQ ID NO: 8580 - RNA, 19 nt, Artificial Sequence
  Synthetic
ggaaagaucccaagucaaa

SEQ ID NO: 8581 - RNA, 19 nt, Artificial Sequence
  Synthetic
cggcaaagcaggagaaacu

SEQ ID NO: 8582 - RNA, 19 nt, Artificial Sequence
  Synthetic
cauagaagcuguagaugaa

SEQ ID NO: 8583 - RNA, 19 nt, Artificial Sequence
  Synthetic
agucaaacaguguggcuua

SEQ ID NO: 8584 - RNA, 19 nt, Artificial Sequence
  Synthetic
gaaaccaaaccuaaggaaa

SEQ ID NO: 8585 - RNA, 19 nt, Artificial Sequence
  Synthetic
ugaacaagaugguaucaaa

SEQ ID NO: 8586 - RNA, 19 nt, Artificial Sequence
  Synthetic
ggguggagaagaagggaga

SEQ ID NO: 8587 - RNA, 19 nt, Artificial Sequence
  Synthetic
acauagaagcuguagauga

SEQ ID NO: 8588 - RNA, 19 nt, Artificial Sequence
  Synthetic
ggacacauaacaaggaaaa

SEQ ID NO: 8589 - RNA, 19 nt, Artificial Sequence
  Synthetic
cugcugaggcugaagcuaa

SEQ ID NO: 8590 - RNA, 19 nt, Artificial Sequence
  Synthetic
gaacauagaagcuguagau

SEQ ID NO: 8591 - RNA, 19 nt, Artificial Sequence
  Synthetic
gaacaugccugaacucuaa

SEQ ID NO: 8592 - RNA, 19 nt, Artificial Sequence
  Synthetic
ggaaauucuugcacuguau

SEQ ID NO: 8593 - RNA, 19 nt, Artificial Sequence
  Synthetic
acuaaagcuuccacugaua

SEQ ID NO: 8594 - RNA, 19 nt, Artificial Sequence
  Synthetic
guaaagaagaggaaccuga

SEQ ID NO: 8595 - RNA, 19 nt, Artificial Sequence
  Synthetic
ccgaugggguggagaagaa

SEQ ID NO: 8596 - RNA, 19 nt, Artificial Sequence
  Synthetic
gagaaggaaaggagagaag

SEQ ID NO: 8597 - RNA, 19 nt, Artificial Sequence
  Synthetic
aaggagagaagaaggauga

SEQ ID NO: 8598 - RNA, 19 nt, Artificial Sequence
  Synthetic
ucauaaggccgcaaccaaa

SEQ ID NO: 8599 - RNA, 19 nt, Artificial Sequence
  Synthetic
cuguaugagaagaaccaaa

SEQ ID NO: 8600 - RNA, 19 nt, Artificial Sequence
  Synthetic
aagaggaaccugaggcuga

SEQ ID NO: 8601 - RNA, 19 nt, Artificial Sequence
  Synthetic
gggaaauucuugcacugua

SEQ ID NO: 8602 - RNA, 19 nt, Artificial Sequence
  Synthetic
caggaaagaucccaaguca

SEQ ID NO: 8603 - RNA, 19 nt, Artificial Sequence
  Synthetic
uaagaaagagagagaagga

SEQ ID NO: 8604 - RNA, 19 nt, Artificial Sequence
  Synthetic
cgaccaaaagauugaacaa

SEQ ID NO: 8605 - RNA, 19 nt, Artificial Sequence
  Synthetic
gagagaaggaaaggagaga

SEQ ID NO: 8606 - RNA, 19 nt, Artificial Sequence
  Synthetic
ggagagaaggcaggaagaa

SEQ ID NO: 8607 - RNA, 19 nt, Artificial Sequence
  Synthetic
aggcugaagcuaauaagaa

SEQ ID NO: 8608 - RNA, 19 nt, Artificial Sequence
  Synthetic
gcggagaagccuuggauau

SEQ ID NO: 8609 - RNA, 19 nt, Artificial Sequence
  Synthetic
aggagaagguagagcagau

SEQ ID NO: 8610 - RNA, 19 nt, Artificial Sequence
  Synthetic
ccaagaaggagaagguaga

SEQ ID NO: 8611 - RNA, 19 nt, Artificial Sequence
  Synthetic
ggcacuaacuucaggguga

SEQ ID NO: 8612 - RNA, 19 nt, Artificial Sequence
  Synthetic
ccucaggagcagaagggaa

SEQ ID NO: 8613 - RNA, 19 nt, Artificial Sequence
  Synthetic
caaaccagcccgaggagaa

SEQ ID NO: 8614 - RNA, 19 nt, Artificial Sequence
  Synthetic
ccuaagauuguguggguuu

SEQ ID NO: 8615 - RNA, 19 nt, Artificial Sequence
  Synthetic
agaccaaacaccagaugua

SEQ ID NO: 8616 - RNA, 19 nt, Artificial Sequence
  Synthetic
ccgacucguuggagaacaa

SEQ ID NO: 8617 - RNA, 19 nt, Artificial Sequence
  Synthetic
gcucauagguggcaaguac

SEQ ID NO: 8618 - RNA, 19 nt, Artificial Sequence
  Synthetic
aggaggaggaccugaagaa

SEQ ID NO: 8619 - RNA, 19 nt, Artificial Sequence
  Synthetic
aaauggaugugguggcaau

SEQ ID NO: 8620 - RNA, 19 nt, Artificial Sequence
  Synthetic
cugagaugcucuucgacua

SEQ ID NO: 8621 - RNA, 19 nt, Artificial Sequence
  Synthetic
gcgaggacguaaugcgcau

SEQ ID NO: 8622 - RNA, 19 nt, Artificial Sequence
  Synthetic
agacggaugcagaaggaga

SEQ ID NO: 8623 - RNA, 19 nt, Artificial Sequence
  Synthetic
cggagaagccuuggauauu

SEQ ID NO: 8624 - RNA, 19 nt, Artificial Sequence
  Synthetic
gcaagcagaucuacaacau

SEQ ID NO: 8625 - RNA, 19 nt, Artificial Sequence
  Synthetic
guuaacaugcccagaccaa

SEQ ID NO: 8626 - RNA, 19 nt, Artificial Sequence
  Synthetic
uggaggagaugcagaaugu

SEQ ID NO: 8627 - RNA, 19 nt, Artificial Sequence
  Synthetic
ccugcuacauggaggagau

SEQ ID NO: 8628 - RNA, 19 nt, Artificial Sequence
  Synthetic
cuucaaggccucaggagca

SEQ ID NO: 8629 - RNA, 19 nt, Artificial Sequence
  Synthetic
aggaggaaacugugacuga

SEQ ID NO: 8630 - RNA, 19 nt, Artificial Sequence
  Synthetic
gggugaugcuggugaaggu

SEQ ID NO: 8631 - RNA, 19 nt, Artificial Sequence
  Synthetic
acgaguuccugcuggagua

SEQ ID NO: 8632 - RNA, 19 nt, Artificial Sequence
  Synthetic
ggcacgaagacaucgauaa

SEQ ID NO: 8633 - RNA, 19 nt, Artificial Sequence
  Synthetic
acauggaggagaugcagaa

SEQ ID NO: 8634 - RNA, 19 nt, Artificial Sequence
  Synthetic
ucuccgacuuccuggacaa

SEQ ID NO: 8635 - RNA, 19 nt, Artificial Sequence
  Synthetic
gaaggguccagaagggaau

SEQ ID NO: 8636 - RNA, 19 nt, Artificial Sequence
  Synthetic
gagcagaagggaacaaugu

SEQ ID NO: 8637 - RNA, 19 nt, Artificial Sequence
  Synthetic
gagagauggcgauggaugu

SEQ ID NO: 8638 - RNA, 19 nt, Artificial Sequence
  Synthetic
ucacagagcucacgacaaa

SEQ ID NO: 8639 - RNA, 19 nt, Artificial Sequence
  Synthetic
ccuaugaggacaaggagaa

SEQ ID NO: 8640 - RNA, 19 nt, Artificial Sequence
  Synthetic
ggaguaacaaggugaucaa

SEQ ID NO: 8641 - RNA, 19 nt, Artificial Sequence
  Synthetic
gcacgaggcucuagaaaug

SEQ ID NO: 8642 - RNA, 19 nt, Artificial Sequence
  Synthetic
uuaacaugaucuuggcaaa

SEQ ID NO: 8643 - RNA, 19 nt, Artificial Sequence
  Synthetic
gcaacaaaacuauggaaau

SEQ ID NO: 8644 - RNA, 19 nt, Artificial Sequence
  Synthetic
ccaauaaacgugcuaggaa

SEQ ID NO: 8645 - RNA, 19 nt, Artificial Sequence
  Synthetic
gcgggaacauggaggagga

SEQ ID NO: 8646 - RNA, 19 nt, Artificial Sequence
  Synthetic
ggaaacacacacagacaca

SEQ ID NO: 8647 - RNA, 19 nt, Artificial Sequence
  Synthetic
ccagaugaccucagugaca

SEQ ID NO: 8648 - RNA, 19 nt, Artificial Sequence
  Synthetic
aggacaaggagaagcccaa

SEQ ID NO: 8649 - RNA, 19 nt, Artificial Sequence
  Synthetic
acauggaggaggaguguga

SEQ ID NO: 8650 - RNA, 19 nt, Artificial Sequence
  Synthetic
agaaggagcugcagugucu

SEQ ID NO: 8651 - RNA, 19 nt, Artificial Sequence
  Synthetic
ccugcaaccugaaugacaa

SEQ ID NO: 8652 - RNA, 19 nt, Artificial Sequence
  Synthetic
cugaaugacaacugcaaga

SEQ ID NO: 8653 - RNA, 19 nt, Artificial Sequence
  Synthetic
cugcagaucuacuggagca

SEQ ID NO: 8654 - RNA, 19 nt, Artificial Sequence
  Synthetic
ugaccgagggugaggaguu

SEQ ID NO: 8655 - RNA, 19 nt, Artificial Sequence
  Synthetic
acaccaugcuggccaacaa

SEQ ID NO: 8656 - RNA, 19 nt, Artificial Sequence
  Synthetic
aggaggagugugagaaguu

SEQ ID NO: 8657 - RNA, 19 nt, Artificial Sequence
  Synthetic
gagaaguuccucagggacu

SEQ ID NO: 8658 - RNA, 19 nt, Artificial Sequence
  Synthetic
ccuuggaggucuugcagga

SEQ ID NO: 8659 - RNA, 19 nt, Artificial Sequence
  Synthetic
gcaugaagaaggagcugca

SEQ ID NO: 8660 - RNA, 19 nt, Artificial Sequence
  Synthetic
ggguuugacaugacaccua

SEQ ID NO: 8661 - RNA, 19 nt, Artificial Sequence
  Synthetic
cuucaaggauggagauggu

SEQ ID NO: 8662 - RNA, 19 nt, Artificial Sequence
  Synthetic
gggcacgaggcucuagaaa

SEQ ID NO: 8663 - RNA, 19 nt, Artificial Sequence
  Synthetic
uaaccaaggcuccaauaaa

SEQ ID NO: 8664 - RNA, 19 nt, Artificial Sequence
  Synthetic
cgaaauggaaacacacaca

SEQ ID NO: 8665 - RNA, 19 nt, Artificial Sequence
  Synthetic
uggucagcgccaagagcaa

SEQ ID NO: 8666 - RNA, 19 nt, Artificial Sequence
  Synthetic
ggcacgaggcucuagaaau

SEQ ID NO: 8667 - RNA, 19 nt, Artificial Sequence
  Synthetic
uagaaaugcccuucacuuu

SEQ ID NO: 8668 - RNA, 19 nt, Artificial Sequence
  Synthetic
gaacaggacccuaaggaaa

SEQ ID NO: 8669 - RNA, 19 nt, Artificial Sequence
  Synthetic
ggaagaaagcugugaugaa

SEQ ID NO: 8670 - RNA, 19 nt, Artificial Sequence
  Synthetic
ccucuaagauguaggaaga

SEQ ID NO: 8671 - RNA, 19 nt, Artificial Sequence
  Synthetic
agagaaaacaugugagaaa

SEQ ID NO: 8672 - RNA, 19 nt, Artificial Sequence
  Synthetic
uuuccaaacucgagagauu

SEQ ID NO: 8673 - RNA, 19 nt, Artificial Sequence
  Synthetic
caaacuuggcagagacaaa

SEQ ID NO: 8674 - RNA, 19 nt, Artificial Sequence
  Synthetic
agaaagugguauuccauaa

SEQ ID NO: 8675 - RNA, 19 nt, Artificial Sequence
  Synthetic
gagacaaaccaguauauua

SEQ ID NO: 8676 - RNA, 19 nt, Artificial Sequence
  Synthetic
ggaagguucuguagcuaua

SEQ ID NO: 8677 - RNA, 19 nt, Artificial Sequence
  Synthetic
gaaucgagacuguggaauu

SEQ ID NO: 8678 - RNA, 19 nt, Artificial Sequence
  Synthetic
caagauaacuggagagccu

SEQ ID NO: 8679 - RNA, 19 nt, Artificial Sequence
  Synthetic
uauaaagaccucagaagaa

SEQ ID NO: 8680 - RNA, 19 nt, Artificial Sequence
  Synthetic
cguugagagucuuaguaaa

SEQ ID NO: 8681 - RNA, 19 nt, Artificial Sequence
  Synthetic
gaucuauggccuaaugaaa

SEQ ID NO: 8682 - RNA, 19 nt, Artificial Sequence
  Synthetic
gcccagcgcaagagggaua

SEQ ID NO: 8683 - RNA, 19 nt, Artificial Sequence
  Synthetic
acaaaugcaaguaggacua

SEQ ID NO: 8684 - RNA, 19 nt, Artificial Sequence
  Synthetic
caaguagaccuguggcuua

SEQ ID NO: 8685 - RNA, 19 nt, Artificial Sequence
  Synthetic
gagaaggauggguggaaca

SEQ ID NO: 8686 - RNA, 19 nt, Artificial Sequence
  Synthetic
gcagguagauggaggaaug

SEQ ID NO: 8687 - RNA, 19 nt, Artificial Sequence
  Synthetic
ggacuaugcuuuucaacau

SEQ ID NO: 8688 - RNA, 19 nt, Artificial Sequence
  Synthetic
ggacaaaugugcuuccaga

SEQ ID NO: 8689 - RNA, 19 nt, Artificial Sequence
  Synthetic
gucagcaaccagagggaaa

SEQ ID NO: 8690 - RNA, 19 nt, Artificial Sequence
  Synthetic
ggaagaauucggauccuua

SEQ ID NO: 8691 - RNA, 19 nt, Artificial Sequence
  Synthetic
auaaagaccucagaagaaa

SEQ ID NO: 8692 - RNA, 19 nt, Artificial Sequence
  Synthetic
gcaaguaggacuaugcuuu

SEQ ID NO: 8693 - RNA, 19 nt, Artificial Sequence
  Synthetic
aggaaugaccagcaacaaa

SEQ ID NO: 8694 - RNA, 19 nt, Artificial Sequence
  Synthetic
gggacaagauaacuggaga

SEQ ID NO: 8695 - RNA, 19 nt, Artificial Sequence
  Synthetic
acuauugauucauggcuua

SEQ ID NO: 8696 - RNA, 19 nt, Artificial Sequence
  Synthetic
cauuagaagcuguuuguuu

SEQ ID NO: 8697 - RNA, 19 nt, Artificial Sequence
  Synthetic
gaacauacucaaacacuuu

SEQ ID NO: 8698 - RNA, 19 nt, Artificial Sequence
  Synthetic
gaacaagacccuaaagaaa

SEQ ID NO: 8699 - RNA, 19 nt, Artificial Sequence
  Synthetic
ggaauuaacacaagaguuu

SEQ ID NO: 8700 - RNA, 19 nt, Artificial Sequence
  Synthetic
ccaaaaggcuguugaagaa

SEQ ID NO: 8701 - RNA, 19 nt, Artificial Sequence
  Synthetic
ggaagaaagccguaaugaa

SEQ ID NO: 8702 - RNA, 19 nt, Artificial Sequence
  Synthetic
gcccagugcaagagggaua

SEQ ID NO: 8703 - RNA, 19 nt, Artificial Sequence
  Synthetic
gaaccgagacuguggaauu

SEQ ID NO: 8704 - RNA, 19 nt, Artificial Sequence
  Synthetic
ggaacaagacccuaaagaa

SEQ ID NO: 8705 - RNA, 19 nt, Artificial Sequence
  Synthetic
ggaagguucuguugcuaua

SEQ ID NO: 8706 - RNA, 19 nt, Artificial Sequence
  Synthetic
cauugaaagacuugcuaaa

SEQ ID NO: 8707 - RNA, 19 nt, Artificial Sequence
  Synthetic
gagagaagccagcauauua

SEQ ID NO: 8708 - RNA, 19 nt, Artificial Sequence
  Synthetic
ugaaagacuugcuaaagaa

SEQ ID NO: 8709 - RNA, 19 nt, Artificial Sequence
  Synthetic
agcgagaacgugugagaaa

SEQ ID NO: 8710 - RNA, 19 nt, Artificial Sequence
  Synthetic
uuuccaaacccgagagauu

SEQ ID NO: 8711 - RNA, 19 nt, Artificial Sequence
  Synthetic
acaaaugcaaguaggacaa

SEQ ID NO: 8712 - RNA, 19 nt, Artificial Sequence
  Synthetic
gcuaauuggagcaagauau

SEQ ID NO: 8713 - RNA, 19 nt, Artificial Sequence
  Synthetic
ggaauuaacacaagaguuc

SEQ ID NO: 8714 - RNA, 19 nt, Artificial Sequence
  Synthetic
gugagaaacuugacgaacu

SEQ ID NO: 8715 - RNA, 19 nt, Artificial Sequence
  Synthetic
caaacuaggcagagagaag

SEQ ID NO: 8716 - RNA, 19 nt, Artificial Sequence
  Synthetic
gggacaaguuaacaggaga

SEQ ID NO: 8717 - RNA, 19 nt, Artificial Sequence
  Synthetic
cuaauuggagcaagauaua

SEQ ID NO: 8718 - RNA, 19 nt, Artificial Sequence
  Synthetic
ggccacagaaagugaaauu

SEQ ID NO: 8719 - RNA, 19 nt, Artificial Sequence
  Synthetic
gaggaaugaccaacaacaa

SEQ ID NO: 8720 - RNA, 19 nt, Artificial Sequence
  Synthetic
gaaccgugacuguggaauu

SEQ ID NO: 8721 - RNA, 19 nt, Artificial Sequence
  Synthetic
ggaaauaguaacuucguca

SEQ ID NO: 8722 - RNA, 19 nt, Artificial Sequence
  Synthetic
guaaugaagucaauggguu

SEQ ID NO: 8723 - RNA, 19 nt, Artificial Sequence
  Synthetic
gaucuauggccuaauuaaa

SEQ ID NO: 8724 - RNA, 19 nt, Artificial Sequence
  Synthetic
gucagcaaucagagggaaa

SEQ ID NO: 8725 - RNA, 19 nt, Artificial Sequence
  Synthetic
agacuugugaccugaaaua

SEQ ID NO: 8726 - RNA, 19 nt, Artificial Sequence
  Synthetic
gcucaaacccuguaaguua

SEQ ID NO: 8727 - RNA, 19 nt, Artificial Sequence
  Synthetic
ggaaauacauaucgaauga

SEQ ID NO: 8728 - RNA, 19 nt, Artificial Sequence
  Synthetic
cgucagauuggaagagaaa

SEQ ID NO: 8729 - RNA, 19 nt, Artificial Sequence
  Synthetic
cagcaugaagggugaaaua

SEQ ID NO: 8730 - RNA, 19 nt, Artificial Sequence
  Synthetic
aggaaucggugguggaauu

SEQ ID NO: 8731 - RNA, 19 nt, Artificial Sequence
  Synthetic
ggaaauuuggccaaggaaa

SEQ ID NO: 8732 - RNA, 19 nt, Artificial Sequence
  Synthetic
aaacugaacugcagaauuu

SEQ ID NO: 8733 - RNA, 19 nt, Artificial Sequence
  Synthetic
ccuaagaacagcuggaaca

SEQ ID NO: 8734 - RNA, 19 nt, Artificial Sequence
  Synthetic
ggaaaggaaauuuggccaa

SEQ ID NO: 8735 - RNA, 19 nt, Artificial Sequence
  Synthetic
ggguagacaaugauggcaa

SEQ ID NO: 8736 - RNA, 19 nt, Artificial Sequence
  Synthetic
gcaaagagaugguucgagu

SEQ ID NO: 8737 - RNA, 19 nt, Artificial Sequence
  Synthetic
gaagaagggcauugagcau

SEQ ID NO: 8738 - RNA, 19 nt, Artificial Sequence
  Synthetic
aguuggagcuuuuggaaca

SEQ ID NO: 8739 - RNA, 19 nt, Artificial Sequence
  Synthetic
ucgagaaguuggagcuuuu

SEQ ID NO: 8740 - RNA, 19 nt, Artificial Sequence
  Synthetic
caaagcagcuacaauaaua

SEQ ID NO: 8741 - RNA, 19 nt, Artificial Sequence
  Synthetic
cucccaaggugcuggauua

SEQ ID NO: 8742 - RNA, 19 nt, Artificial Sequence
  Synthetic
gguauugaaucuaaaccaa

SEQ ID NO: 8743 - RNA, 19 nt, Artificial Sequence
  Synthetic
ucagauuggaagagaaaca

SEQ ID NO: 8744 - RNA, 19 nt, Artificial Sequence
  Synthetic
uaacaaaacuggcucauua

SEQ ID NO: 8745 - RNA, 19 nt, Artificial Sequence
  Synthetic
caaccaaacugauccaaga

SEQ ID NO: 8746 - RNA, 19 nt, Artificial Sequence
  Synthetic
ggagaagaauggaaauaac

SEQ ID NO: 8747 - RNA, 19 nt, Artificial Sequence
  Synthetic
agauauauggggauggaaa

SEQ ID NO: 8748 - RNA, 19 nt, Artificial Sequence
  Synthetic
ccguguaaauccucgggaa

SEQ ID NO: 8749 - RNA, 19 nt, Artificial Sequence
  Synthetic
aaggaaagggacuggaaaa

SEQ ID NO: 8750 - RNA, 19 nt, Artificial Sequence
  Synthetic
acaaagacuacaugagcau

SEQ ID NO: 8751 - RNA, 19 nt, Artificial Sequence
  Synthetic
cagccaagaacaaagacua

SEQ ID NO: 8752 - RNA, 19 nt, Artificial Sequence
  Synthetic
acaagcaaaucauggagaa

SEQ ID NO: 8753 - RNA, 19 nt, Artificial Sequence
  Synthetic
gggaaggaauugugcugca

SEQ ID NO: 8754 - RNA, 19 nt, Artificial Sequence
  Synthetic
guucuugucuuuaggauga

SEQ ID NO: 8755 - RNA, 19 nt, Artificial Sequence
  Synthetic
cuaccaaguuucauaccaa

SEQ ID NO: 8756 - RNA, 19 nt, Artificial Sequence
  Synthetic
ccaugaaggucaagaggaa

SEQ ID NO: 8757 - RNA, 19 nt, Artificial Sequence
  Synthetic
ccaaauagcugggcagaaa

SEQ ID NO: 8758 - RNA, 19 nt, Artificial Sequence
  Synthetic
aauuaaagaucgagacgaa

SEQ ID NO: 8759 - RNA, 19 nt, Artificial Sequence
  Synthetic
ugacauugauuauggguua

SEQ ID NO: 8760 - RNA, 19 nt, Artificial Sequence
  Synthetic
agagagagcaggagagcua

SEQ ID NO: 8761 - RNA, 19 nt, Artificial Sequence
  Synthetic
caaagagacucaagaagaa

SEQ ID NO: 8762 - RNA, 19 nt, Artificial Sequence
  Synthetic
ggaccuaaaucuacguaua

SEQ ID NO: 8763 - RNA, 19 nt, Artificial Sequence
  Synthetic
aaacaaagcaagagcaaga

SEQ ID NO: 8764 - RNA, 19 nt, Artificial Sequence
  Synthetic
ggaaauggaacgucagaau

SEQ ID NO: 8765 - RNA, 19 nt, Artificial Sequence
  Synthetic
agaaagagaugcagaggga

SEQ ID NO: 8766 - RNA, 19 nt, Artificial Sequence
  Synthetic
agacagaacuggagcgacu

SEQ ID NO: 8767 - RNA, 19 nt, Artificial Sequence
  Synthetic
gaggaaucuucaaaggaaa

SEQ ID NO: 8768 - RNA, 19 nt, Artificial Sequence
  Synthetic
uggcaggaauguacggaaa

SEQ ID NO: 8769 - RNA, 19 nt, Artificial Sequence
  Synthetic
caaacaagaacuagagaca

SEQ ID NO: 8770 - RNA, 19 nt, Artificial Sequence
  Synthetic
gaaagaaggcucugguuuu

SEQ ID NO: 8771 - RNA, 19 nt, Artificial Sequence
  Synthetic
ccaaagagacucaagaaga

SEQ ID NO: 8772 - RNA, 19 nt, Artificial Sequence
  Synthetic
guggaaaucagaaaggaaa

SEQ ID NO: 8773 - RNA, 19 nt, Artificial Sequence
  Synthetic
gcaaguuaaugaagcagaa

SEQ ID NO: 8774 - RNA, 19 nt, Artificial Sequence
  Synthetic
cgaccaaccauauggcaaa

SEQ ID NO: 8775 - RNA, 19 nt, Artificial Sequence
  Synthetic
gaacagugcacaagauuau

SEQ ID NO: 8776 - RNA, 19 nt, Artificial Sequence
  Synthetic
acaaagaacacauugcaaa

SEQ ID NO: 8777 - RNA, 19 nt, Artificial Sequence
  Synthetic
ggaaagacaaugccagcaa

SEQ ID NO: 8778 - RNA, 19 nt, Artificial Sequence
  Synthetic
agacaaugccagcaacaua

SEQ ID NO: 8779 - RNA, 19 nt, Artificial Sequence
  Synthetic
gcagaaagcauccaaacaa

SEQ ID NO: 8780 - RNA, 19 nt, Artificial Sequence
  Synthetic
ggaaucagcuuaccaauaa

SEQ ID NO: 8781 - RNA, 19 nt, Artificial Sequence
  Synthetic
aacaagaacuagagacaga

SEQ ID NO: 8782 - RNA, 19 nt, Artificial Sequence
  Synthetic
ccaaagauccaaagagacu

SEQ ID NO: 8783 - RNA, 19 nt, Artificial Sequence
  Synthetic
ggaucaaagugaagguaac

SEQ ID NO: 8784 - RNA, 19 nt, Artificial Sequence
  Synthetic
gguggaaaucagaaaggaa

SEQ ID NO: 8785 - RNA, 19 nt, Artificial Sequence
  Synthetic
gaagaagaggguugaugaa

SEQ ID NO: 8786 - RNA, 19 nt, Artificial Sequence
  Synthetic
gaagauuuacagagggaaa

SEQ ID NO: 8787 - RNA, 19 nt, Artificial Sequence
  Synthetic
ggaaagaauuguauacaga

SEQ ID NO: 8788 - RNA, 19 nt, Artificial Sequence
  Synthetic
ggacagaggguucgaggaa

SEQ ID NO: 8789 - RNA, 19 nt, Artificial Sequence
  Synthetic
uuacagaguucuaggaaaa

SEQ ID NO: 8790 - RNA, 19 nt, Artificial Sequence
  Synthetic
acuugaagccugagaauau

SEQ ID NO: 8791 - RNA, 19 nt, Artificial Sequence
  Synthetic
agaaauaccuccagauguu

SEQ ID NO: 8792 - RNA, 19 nt, Artificial Sequence
  Synthetic
ucaggaggcuggaggcaaa

SEQ ID NO: 8793 - RNA, 19 nt, Artificial Sequence
  Synthetic
caauggaaauggcuggaaa

SEQ ID NO: 8794 - RNA, 19 nt, Artificial Sequence
  Synthetic
acauggagcucgagaacau

SEQ ID NO: 8795 - RNA, 19 nt, Artificial Sequence
  Synthetic
gggaaccauuugaagaaua

SEQ ID NO: 8796 - RNA, 19 nt, Artificial Sequence
  Synthetic
acagaggguucgaggaaga

SEQ ID NO: 8797 - RNA, 19 nt, Artificial Sequence
  Synthetic
gcugaaagcgcgucaagaa

SEQ ID NO: 8798 - RNA, 19 nt, Artificial Sequence
  Synthetic
agaaugauaccgaggagua

SEQ ID NO: 8799 - RNA, 19 nt, Artificial Sequence
  Synthetic
caccugaaguugucaauaa

SEQ ID NO: 8800 - RNA, 19 nt, Artificial Sequence
  Synthetic
ccaaagaugccuugugcuu

SEQ ID NO: 8801 - RNA, 19 nt, Artificial Sequence
  Synthetic
cuaaagaggcacauugaau

SEQ ID NO: 8802 - RNA, 19 nt, Artificial Sequence
  Synthetic
ggagaaagugcaaaguaga

SEQ ID NO: 8803 - RNA, 19 nt, Artificial Sequence
  Synthetic
guacuagaguugcccauaa

SEQ ID NO: 8804 - RNA, 19 nt, Artificial Sequence
  Synthetic
ccaagaaagcucauauuuu

SEQ ID NO: 8805 - RNA, 19 nt, Artificial Sequence
  Synthetic
gaggaaaggugaagcuaug

SEQ ID NO: 8806 - RNA, 19 nt, Artificial Sequence
  Synthetic
gaugaggaccgaagugauu

SEQ ID NO: 8807 - RNA, 19 nt, Artificial Sequence
  Synthetic
agcaagaaguggaaagaaa

SEQ ID NO: 8808 - RNA, 19 nt, Artificial Sequence
  Synthetic
ggaaagaaauccugaaguu

SEQ ID NO: 8809 - RNA, 19 nt, Artificial Sequence
  Synthetic
ggagagaaagggaaggaaa

SEQ ID NO: 8810 - RNA, 19 nt, Artificial Sequence
  Synthetic
cugcagaggucaagagaca

SEQ ID NO: 8811 - RNA, 19 nt, Artificial Sequence
  Synthetic
caguggaagugguuggaaa

SEQ ID NO: 8812 - RNA, 19 nt, Artificial Sequence
  Synthetic
ggaaggaaauuaugaccaa

SEQ ID NO: 8813 - RNA, 19 nt, Artificial Sequence
  Synthetic
cgucauaacuagaacugaa

SEQ ID NO: 8814 - RNA, 19 nt, Artificial Sequence
  Synthetic
gagagaaagggaaggaaau

SEQ ID NO: 8815 - RNA, 19 nt, Artificial Sequence
  Synthetic
gagaagaagaggaucaaaa

SEQ ID NO: 8816 - RNA, 19 nt, Artificial Sequence
  Synthetic
acgaauaucuggacagcau

SEQ ID NO: 8817 - RNA, 19 nt, Artificial Sequence
  Synthetic
gcaagaaguggaaagaaau

SEQ ID NO: 8818 - RNA, 19 nt, Artificial Sequence
  Synthetic
ggccugggcuggaguguua

SEQ ID NO: 8819 - RNA, 19 nt, Artificial Sequence
  Synthetic
gagaaagggaaggaaauua

SEQ ID NO: 8820 - RNA, 19 nt, Artificial Sequence
  Synthetic
ccgaaggaccauagacaga

SEQ ID NO: 8821 - RNA, 19 nt, Artificial Sequence
  Synthetic
gaacauugcaauagaaauc

SEQ ID NO: 8822 - RNA, 19 nt, Artificial Sequence
  Synthetic
ugaaguuacuccagaugaa

SEQ ID NO: 8823 - RNA, 19 nt, Artificial Sequence
  Synthetic
guaaggacgugcuggacau

SEQ ID NO: 8824 - RNA, 19 nt, Artificial Sequence
  Synthetic
ucgagaaggucaacaguca

SEQ ID NO: 8825 - RNA, 19 nt, Artificial Sequence
  Synthetic
ccacauaaacucaaaccau

SEQ ID NO: 8826 - RNA, 19 nt, Artificial Sequence
  Synthetic
agaaagggaaggaaauuau

SEQ ID NO: 8827 - RNA, 19 nt, Artificial Sequence
  Synthetic
gcaagaugcugcucacgaa

SEQ ID NO: 8828 - RNA, 19 nt, Artificial Sequence
  Synthetic
agagauuacugcaguuuau

SEQ ID NO: 8829 - RNA, 19 nt, Artificial Sequence
  Synthetic
cuacagaagccgugcaaag

SEQ ID NO: 8830 - RNA, 19 nt, Artificial Sequence
  Synthetic
caucagaacaauuccaaga

SEQ ID NO: 8831 - RNA, 19 nt, Artificial Sequence
  Synthetic
ccauggagcucgagaacau

SEQ ID NO: 8832 - RNA, 19 nt, Artificial Sequence
  Synthetic
cagcagaggaagaagaaga

SEQ ID NO: 8833 - RNA, 19 nt, Artificial Sequence
  Synthetic
ccucauaacaauagacaca

SEQ ID NO: 8834 - RNA, 19 nt, Artificial Sequence
  Synthetic
caguggaaguggcuggaaa

SEQ ID NO: 8835 - RNA, 19 nt, Artificial Sequence
  Synthetic
cggagguggugaagaauga

SEQ ID NO: 8836 - RNA, 19 nt, Artificial Sequence
  Synthetic
acacaugugcccagcaaua

SEQ ID NO: 8837 - RNA, 19 nt, Artificial Sequence
  Synthetic
cagaggagccacugccaaa

SEQ ID NO: 8838 - RNA, 19 nt, Artificial Sequence
  Synthetic
agaagcagauccuggagaa

SEQ ID NO: 8839 - RNA, 19 nt, Artificial Sequence
  Synthetic
cuccggagguggugaagaa

SEQ ID NO: 8840 - RNA, 19 nt, Artificial Sequence
  Synthetic
ccgacuaccucgacagcau

SEQ ID NO: 8841 - RNA, 19 nt, Artificial Sequence
  Synthetic
gcucacagcuccucugcaa

SEQ ID NO: 8842 - RNA, 19 nt, Artificial Sequence
  Synthetic
agaggaagaagaagaucaa

SEQ ID NO: 8843 - RNA, 19 nt, Artificial Sequence
  Synthetic
gaaagugaacaguagguuu

SEQ ID NO: 8844 - RNA, 19 nt, Artificial Sequence
  Synthetic
cagaggaagaagaagauca

SEQ ID NO: 8845 - RNA, 19 nt, Artificial Sequence
  Synthetic
cgccaagauugcuguggaa

SEQ ID NO: 8846 - RNA, 19 nt, Artificial Sequence
  Synthetic
gcccuaggccugugccaaa

SEQ ID NO: 8847 - RNA, 19 nt, Artificial Sequence
  Synthetic
gaagcagauccuggagaaa

SEQ ID NO: 8848 - RNA, 19 nt, Artificial Sequence
  Synthetic
gcagcgacagcgaggaaga

SEQ ID NO: 8849 - RNA, 19 nt, Artificial Sequence
  Synthetic
guaagaaacuggacaagaa

SEQ ID NO: 8850 - RNA, 19 nt, Artificial Sequence
  Synthetic
gcuuagaaauugaguugaa

SEQ ID NO: 8851 - RNA, 19 nt, Artificial Sequence
  Synthetic
ggacaugaagccugagaau

SEQ ID NO: 8852 - RNA, 19 nt, Artificial Sequence
  Synthetic
ggguggaauuugaugacaa

SEQ ID NO: 8853 - RNA, 19 nt, Artificial Sequence
  Synthetic
gaagaaagguggcgagaag

SEQ ID NO: 8854 - RNA, 19 nt, Artificial Sequence
  Synthetic
ccaaagacaucgcugaaau

SEQ ID NO: 8855 - RNA, 19 nt, Artificial Sequence
  Synthetic
gagcaagacucuaucucaa

SEQ ID NO: 8856 - RNA, 19 nt, Artificial Sequence
  Synthetic
gagaacagcuugaccauuu

SEQ ID NO: 8857 - RNA, 19 nt, Artificial Sequence
  Synthetic
gcucaaaacuucaaucaua

SEQ ID NO: 8858 - RNA, 19 nt, Artificial Sequence
  Synthetic
gauguaugccuguaagaaa

SEQ ID NO: 8859 - RNA, 19 nt, Artificial Sequence
  Synthetic
ccugagauccuaauggaaa

SEQ ID NO: 8860 - RNA, 19 nt, Artificial Sequence
  Synthetic
guaaagaggaucugaagca

SEQ ID NO: 8861 - RNA, 19 nt, Artificial Sequence
  Synthetic
ccaugacaucugugaauua

SEQ ID NO: 8862 - RNA, 19 nt, Artificial Sequence
  Synthetic
ggaagaaauuauagaaacg

SEQ ID NO: 8863 - RNA, 19 nt, Artificial Sequence
  Synthetic
gaacaccauucaaagauua

SEQ ID NO: 8864 - RNA, 19 nt, Artificial Sequence
  Synthetic
uagcauggcaggaagaaau

SEQ ID NO: 8865 - RNA, 19 nt, Artificial Sequence
  Synthetic
agaagcggcugaagaagaa

SEQ ID NO: 8866 - RNA, 19 nt, Artificial Sequence
  Synthetic
gagccaagaucgcaacauu

SEQ ID NO: 8867 - RNA, 19 nt, Artificial Sequence
  Synthetic
ggucagggguucaagacua

SEQ ID NO: 8868 - RNA, 19 nt, Artificial Sequence
  Synthetic
ggaagauguaugccuguaa

SEQ ID NO: 8869 - RNA, 19 nt, Artificial Sequence
  Synthetic
aaagaggaucugaagcaaa

SEQ ID NO: 8870 - RNA, 19 nt, Artificial Sequence
  Synthetic
aaugagggcuaaucaguua

SEQ ID NO: 8871 - RNA, 19 nt, Artificial Sequence
  Synthetic
ugaagaagaggaagggcua

SEQ ID NO: 8872 - RNA, 19 nt, Artificial Sequence
  Synthetic
agagcaagaccaagggcua

SEQ ID NO: 8873 - RNA, 19 nt, Artificial Sequence
  Synthetic
cggacgacaugaagggcau

SEQ ID NO: 8874 - RNA, 19 nt, Artificial Sequence
  Synthetic
acaagaaguaccuggccaa

SEQ ID NO: 8875 - RNA, 19 nt, Artificial Sequence
  Synthetic
ccugcaagaagcugaacaa

SEQ ID NO: 8876 - RNA, 19 nt, Artificial Sequence
  Synthetic
acaacgugaaugaggagaa

SEQ ID NO: 8877 - RNA, 19 nt, Artificial Sequence
  Synthetic
uggagaaggacccggagaa

SEQ ID NO: 8878 - RNA, 19 nt, Artificial Sequence
  Synthetic
agaacaaggagcugaagca

SEQ ID NO: 8879 - RNA, 19 nt, Artificial Sequence
  Synthetic
cugucuacgcaaaggauau

SEQ ID NO: 8880 - RNA, 19 nt, Artificial Sequence
  Synthetic
ccgugaaguacccugauaa

SEQ ID NO: 8881 - RNA, 19 nt, Artificial Sequence
  Synthetic
uggagaacaaggagcugaa

SEQ ID NO: 8882 - RNA, 19 nt, Artificial Sequence
  Synthetic
agaugaaggcgaccggcaa

SEQ ID NO: 8883 - RNA, 19 nt, Artificial Sequence
  Synthetic
acaaugaccuccagccaca

SEQ ID NO: 8884 - RNA, 19 nt, Artificial Sequence
  Synthetic
acaucuacaacgugaauga

SEQ ID NO: 8885 - RNA, 19 nt, Artificial Sequence
  Synthetic
acacagaauucuuucagga

SEQ ID NO: 8886 - RNA, 19 nt, Artificial Sequence
  Synthetic
ggaaauggcuggaaaggca

SEQ ID NO: 8887 - RNA, 19 nt, Artificial Sequence
  Synthetic
agaauaaagaagaggaaag

SEQ ID NO: 8888 - RNA, 19 nt, Artificial Sequence
  Synthetic
agaaggaaguggaacccaa

SEQ ID NO: 8889 - RNA, 19 nt, Artificial Sequence
  Synthetic
ucgagaacaucguggccaa

SEQ ID NO: 8890 - RNA, 19 nt, Artificial Sequence
  Synthetic
cgaucaaagaaucaagaau

SEQ ID NO: 8891 - RNA, 19 nt, Artificial Sequence
  Synthetic
auuacagaguucuaggaaa

SEQ ID NO: 8892 - RNA, 19 nt, Artificial Sequence
  Synthetic
guagauucguaguuaguuu

SEQ ID NO: 8893 - RNA, 19 nt, Artificial Sequence
  Synthetic
uggaagauuuacagaggga

SEQ ID NO: 8894 - RNA, 19 nt, Artificial Sequence
  Synthetic
aggcggauuuggagagguu

SEQ ID NO: 8895 - RNA, 19 nt, Artificial Sequence
  Synthetic
aggaaagcgcaaagggaaa

SEQ ID NO: 8896 - RNA, 19 nt, Artificial Sequence
  Synthetic
gaggaaagcgcaaagggaa

SEQ ID NO: 8897 - RNA, 19 nt, Artificial Sequence
  Synthetic
uggaaaacaucguggccaa

SEQ ID NO: 8898 - RNA, 19 nt, Artificial Sequence
  Synthetic
aggagaaggugaagcggga

SEQ ID NO: 8899 - RNA, 19 nt, Artificial Sequence
  Synthetic
ggaagugguuggaaaggca

SEQ ID NO: 8900 - RNA, 19 nt, Artificial Sequence
  Synthetic
uuggagaagaagaggauca

SEQ ID NO: 8901 - RNA, 19 nt, Artificial Sequence
  Synthetic
cugcaagaagcuagagaaa

SEQ ID NO: 8902 - RNA, 19 nt, Artificial Sequence
  Synthetic
ggaagguggcgguggaaau

SEQ ID NO: 8903 - RNA, 19 nt, Artificial Sequence
  Synthetic
uggaaaucgcaaaggcaaa

SEQ ID NO: 8904 - RNA, 19 nt, Artificial Sequence
  Synthetic
ggaaguggcuggaaaggca

SEQ ID NO: 8905 - RNA, 19 nt, Artificial Sequence
  Synthetic
agaagaagaucaagcggga

SEQ ID NO: 8906 - RNA, 19 nt, Artificial Sequence
  Synthetic
uguggaaacugcagcgaca

SEQ ID NO: 8907 - RNA, 19 nt, Artificial Sequence
  Synthetic
guggaaaucgcaaaggcaa

SEQ ID NO: 8908 - RNA, 19 nt, Artificial Sequence
  Synthetic
gugugggcaccguggguua

SEQ ID NO: 8909 - RNA, 19 nt, Artificial Sequence
  Synthetic
acgagaugguggagaccga

SEQ ID NO: 8910 - RNA, 19 nt, Artificial Sequence
  Synthetic
agcaagaaauggcggcaga

SEQ ID NO: 8911 - RNA, 19 nt, Artificial Sequence
  Synthetic
ucgagaacaucguagcgaa

SEQ ID NO: 8912 - RNA, 19 nt, Artificial Sequence
  Synthetic
gaugacaagcggaaggcau

SEQ ID NO: 8913 - RNA, 19 nt, Artificial Sequence
  Synthetic
ggcuaagaaaccagagcaa

SEQ ID NO: 8914 - RNA, 19 nt, Artificial Sequence
  Synthetic
ccagauagccugugggaug

SEQ ID NO: 8915 - RNA, 19 nt, Artificial Sequence
  Synthetic
cggguugugaggaggguaa

SEQ ID NO: 8916 - RNA, 19 nt, Artificial Sequence
  Synthetic
ugaaaugguugcuggacga

SEQ ID NO: 8917 - RNA, 19 nt, Artificial Sequence
  Synthetic
aggucaaauuccagcauga

SEQ ID NO: 8918 - RNA, 19 nt, Artificial Sequence
  Synthetic
ccuguaagaaacuggacaa

SEQ ID NO: 8919 - RNA, 19 nt, Artificial Sequence
  Synthetic
cuucagugguuuaugccaa

SEQ ID NO: 8920 - RNA, 19 nt, Artificial Sequence
  Synthetic
gaagaaaggaaaagagaaa

SEQ ID NO: 8921 - RNA, 19 nt, Artificial Sequence
  Synthetic
gagacaagcgggaaggaua

SEQ ID NO: 8922 - RNA, 19 nt, Artificial Sequence
  Synthetic
gagaggagcuggugugcaa

SEQ ID NO: 8923 - RNA, 19 nt, Artificial Sequence
  Synthetic
ggacacacacacagaguaa

SEQ ID NO: 8924 - RNA, 19 nt, Artificial Sequence
  Synthetic
ccaccuagcugguaauuaa

SEQ ID NO: 8925 - RNA, 19 nt, Artificial Sequence
  Synthetic
cggcugaccucgcaggaaa

SEQ ID NO: 8926 - RNA, 19 nt, Artificial Sequence
  Synthetic
caaccaaaucacugaaauu

SEQ ID NO: 8927 - RNA, 19 nt, Artificial Sequence
  Synthetic
gcaagaaaucaaagaagga

SEQ ID NO: 8928 - RNA, 19 nt, Artificial Sequence
  Synthetic
gcugaaagcuaugaugaua

SEQ ID NO: 8929 - RNA, 19 nt, Artificial Sequence
  Synthetic
gcaaggaagcuauuaggaa

SEQ ID NO: 8930 - RNA, 19 nt, Artificial Sequence
  Synthetic
gaagaguugucgucuauaa

SEQ ID NO: 8931 - RNA, 19 nt, Artificial Sequence
  Synthetic
gcacacagacugacaugaa

SEQ ID NO: 8932 - RNA, 19 nt, Artificial Sequence
  Synthetic
acagaacucuuuuggcaua

SEQ ID NO: 8933 - RNA, 19 nt, Artificial Sequence
  Synthetic
ggagacaagccgucaauuu

SEQ ID NO: 8934 - RNA, 19 nt, Artificial Sequence
  Synthetic
caaagaaggaggagacaag

SEQ ID NO: 8935 - RNA, 19 nt, Artificial Sequence
  Synthetic
cauaguaacaucaaccaaa

SEQ ID NO: 8936 - RNA, 19 nt, Artificial Sequence
  Synthetic
ggaaggauaauuagcugaa

SEQ ID NO: 8937 - RNA, 19 nt, Artificial Sequence
  Synthetic
gcugguaauuaaugagguu

SEQ ID NO: 8938 - RNA, 19 nt, Artificial Sequence
  Synthetic
ggauuugacugccuguaua

SEQ ID NO: 8939 - RNA, 19 nt, Artificial Sequence
  Synthetic
gggcaagcaagaaaucaaa

SEQ ID NO: 8940 - RNA, 19 nt, Artificial Sequence
  Synthetic
aggaacaguuggccaagaa

SEQ ID NO: 8941 - RNA, 19 nt, Artificial Sequence
  Synthetic
guuaaaugcucccuugcaa

SEQ ID NO: 8942 - RNA, 19 nt, Artificial Sequence
  Synthetic
ggaaacugguggugggaaa

SEQ ID NO: 8943 - RNA, 19 nt, Artificial Sequence
  Synthetic
ccaaauggaaacugaaaua

SEQ ID NO: 8944 - RNA, 19 nt, Artificial Sequence
  Synthetic
ucaugaagaaggagaauaa

SEQ ID NO: 8945 - RNA, 19 nt, Artificial Sequence
  Synthetic
gggaagaauaugagagagu

SEQ ID NO: 8946 - RNA, 19 nt, Artificial Sequence
  Synthetic
ggauugacuuagagcaaau

SEQ ID NO: 8947 - RNA, 19 nt, Artificial Sequence
  Synthetic
gggcagaugggaagaauau

SEQ ID NO: 8948 - RNA, 19 nt, Artificial Sequence
  Synthetic
cagacaagaugcugaaaca

SEQ ID NO: 8949 - RNA, 19 nt, Artificial Sequence
  Synthetic
gaucaagccggaagagcaa

SEQ ID NO: 8950 - RNA, 19 nt, Artificial Sequence
  Synthetic
caaaugaccuucaagacua

SEQ ID NO: 8951 - RNA, 19 nt, Artificial Sequence
  Synthetic
gacaagaugcugaaacaaa

SEQ ID NO: 8952 - RNA, 19 nt, Artificial Sequence
  Synthetic
gggaugggauugugguuuu

SEQ ID NO: 8953 - RNA, 19 nt, Artificial Sequence
  Synthetic
agggauugacuuagagcaa

SEQ ID NO: 8954 - RNA, 19 nt, Artificial Sequence
  Synthetic
ugaagaaggagaauaacaa

SEQ ID NO: 8955 - RNA, 19 nt, Artificial Sequence
  Synthetic
caucaggaggcaacggaaa

SEQ ID NO: 8956 - RNA, 19 nt, Artificial Sequence
  Synthetic
cagacaggcuggagagaac

SEQ ID NO: 8957 - RNA, 19 nt, Artificial Sequence
  Synthetic
uauugaaggaccagauuua

SEQ ID NO: 8958 - RNA, 19 nt, Artificial Sequence
  Synthetic
cuggagagaacuagaucaa

SEQ ID NO: 8959 - RNA, 19 nt, Artificial Sequence
  Synthetic
ucuacaggcucaugaagaa

SEQ ID NO: 8960 - RNA, 19 nt, Artificial Sequence
  Synthetic
cagaaaaccuuugaggaaa

SEQ ID NO: 8961 - RNA, 19 nt, Artificial Sequence
  Synthetic
ccuucaagacuaaauguaa

SEQ ID NO: 8962 - RNA, 19 nt, Artificial Sequence
  Synthetic
agaaaaccuuugaggaaau

SEQ ID NO: 8963 - RNA, 19 nt, Artificial Sequence
  Synthetic
ucagaaaaccuuugaggaa

SEQ ID NO: 8964 - RNA, 19 nt, Artificial Sequence
  Synthetic
acaagaugcugaaacaaau

SEQ ID NO: 8965 - RNA, 19 nt, Artificial Sequence
  Synthetic
gcaaaugaccggccugauu

SEQ ID NO: 8966 - RNA, 19 nt, Artificial Sequence
  Synthetic
aaucauugcuauugaagga

SEQ ID NO: 8967 - RNA, 19 nt, Artificial Sequence
  Synthetic
gggaaauggaccagagggu

SEQ ID NO: 8968 - RNA, 19 nt, Artificial Sequence
  Synthetic
guuuggagggauugacuua

SEQ ID NO: 8969 - RNA, 19 nt, Artificial Sequence
  Synthetic
ucacacacccguagccaua

SEQ ID NO: 8970 - RNA, 19 nt, Artificial Sequence
  Synthetic
agaagaaaauugugacuga

SEQ ID NO: 8971 - RNA, 19 nt, Artificial Sequence
  Synthetic
aaccaaaggcucugcaaau

SEQ ID NO: 8972 - RNA, 19 nt, Artificial Sequence
  Synthetic
ggacaaagguguucaaauc

SEQ ID NO: 8973 - RNA, 19 nt, Artificial Sequence
  Synthetic
ggguguaaauagauuguua

SEQ ID NO: 8974 - RNA, 19 nt, Artificial Sequence
  Synthetic
ggaacaaauccgagagaug

SEQ ID NO: 8975 - RNA, 19 nt, Artificial Sequence
  Synthetic
gcucuagccugcuggagua

SEQ ID NO: 8976 - RNA, 19 nt, Artificial Sequence
  Synthetic
uaaaucuggugcuggaaua

SEQ ID NO: 8977 - RNA, 19 nt, Artificial Sequence
  Synthetic
agacuagagggcagaggua

SEQ ID NO: 8978 - RNA, 19 nt, Artificial Sequence
  Synthetic
gcucccaagaaguggcuua

SEQ ID NO: 8979 - RNA, 19 nt, Artificial Sequence
  Synthetic
gggaacuagucgccaucaa

SEQ ID NO: 8980 - RNA, 19 nt, Artificial Sequence
  Synthetic
ucaaguucccucagauuaa

SEQ ID NO: 8981 - RNA, 19 nt, Artificial Sequence
  Synthetic
ggaauaugugcccgagaca

SEQ ID NO: 8982 - RNA, 19 nt, Artificial Sequence
  Synthetic
ucaucaaggugcugggaac

SEQ ID NO: 8983 - RNA, 19 nt, Artificial Sequence
  Synthetic
aagcuggaccacugcaaua

SEQ ID NO: 8984 - RNA, 19 nt, Artificial Sequence
  Synthetic
cgagaagaaagacgagcuu

SEQ ID NO: 8985 - RNA, 19 nt, Artificial Sequence
  Synthetic
gaacaaauccgagagauga

SEQ ID NO: 8986 - RNA, 19 nt, Artificial Sequence
  Synthetic
gcacagcuucuuugaugaa

SEQ ID NO: 8987 - RNA, 19 nt, Artificial Sequence
  Synthetic
cgugacagcgggaagguga

SEQ ID NO: 8988 - RNA, 19 nt, Artificial Sequence
  Synthetic
aggacaagagguucaagaa

SEQ ID NO: 8989 - RNA, 19 nt, Artificial Sequence
  Synthetic
guucaaguucccucagauu

SEQ ID NO: 8990 - RNA, 19 nt, Artificial Sequence
  Synthetic
gaacccagcugccuaacaa

SEQ ID NO: 8991 - RNA, 19 nt, Artificial Sequence
  Synthetic
ucacaagcuuuaacugaga

SEQ ID NO: 8992 - RNA, 19 nt, Artificial Sequence
  Synthetic
auauugugaggcugagaua

SEQ ID NO: 8993 - RNA, 19 nt, Artificial Sequence
  Synthetic
uggacaaagguguucaaau

SEQ ID NO: 8994 - RNA, 19 nt, Artificial Sequence
  Synthetic
ccucacaagcuuuaacuga

SEQ ID NO: 8995 - RNA, 19 nt, Artificial Sequence
  Synthetic
accgagagcugcagaucau

SEQ ID NO: 8996 - RNA, 19 nt, Artificial Sequence
  Synthetic
acuccaguggcgagaagaa

SEQ ID NO: 8997 - RNA, 19 nt, Artificial Sequence
  Synthetic
cguagccacucuaggccaa

SEQ ID NO: 8998 - RNA, 19 nt, Artificial Sequence
  Synthetic
uggcuuacacggacaucaa

SEQ ID NO: 8999 - RNA, 19 nt, Artificial Sequence
  Synthetic
ccagggaacuagucgccau

SEQ ID NO: 9000 - RNA, 19 nt, Artificial Sequence
  Synthetic
ccaguggcgagaagaaaga

SEQ ID NO: 9001 - RNA, 19 nt, Artificial Sequence
  Synthetic
gggaacaaauccgagagau

SEQ ID NO: 9002 - RNA, 19 nt, Artificial Sequence
  Synthetic
ggacaagagauuuaagaau

SEQ ID NO: 9003 - RNA, 19 nt, Artificial Sequence
  Synthetic
agaaaguauugcaggacaa

SEQ ID NO: 9004 - RNA, 19 nt, Artificial Sequence
  Synthetic
agaagaaagaugaggucua

SEQ ID NO: 9005 - RNA, 19 nt, Artificial Sequence
  Synthetic
acacuauagucgagccaaa

SEQ ID NO: 9006 - RNA, 19 nt, Artificial Sequence
  Synthetic
gaucauuuggugugguaua

SEQ ID NO: 9007 - RNA, 19 nt, Artificial Sequence
  Synthetic
ccacaagaagucagcuaua

SEQ ID NO: 9008 - RNA, 19 nt, Artificial Sequence
  Synthetic
cucaagaacugucaaguaa

SEQ ID NO: 9009 - RNA, 19 nt, Artificial Sequence
  Synthetic
ggaucaguugguagaaaua

SEQ ID NO: 9010 - RNA, 19 nt, Artificial Sequence
  Synthetic
uugcaggacaagagauuua

SEQ ID NO: 9011 - RNA, 19 nt, Artificial Sequence
  Synthetic
ggaaucugccaucgggaua

SEQ ID NO: 9012 - RNA, 19 nt, Artificial Sequence
  Synthetic
acuaaggauucgucaggaa

SEQ ID NO: 9013 - RNA, 19 nt, Artificial Sequence
  Synthetic
gcagcugguccgaggagaa

SEQ ID NO: 9014 - RNA, 19 nt, Artificial Sequence
  Synthetic
ggucacguuuggaaagaau

SEQ ID NO: 9015 - RNA, 19 nt, Artificial Sequence
  Synthetic
ucagagaaaugaacccaaa

SEQ ID NO: 9016 - RNA, 19 nt, Artificial Sequence
  Synthetic
guuacuaggacaaccaaua

SEQ ID NO: 9017 - RNA, 19 nt, Artificial Sequence
  Synthetic
guuccgaaguuuagccuau

SEQ ID NO: 9018 - RNA, 19 nt, Artificial Sequence
  Synthetic
ucaagaaaguauugcagga

SEQ ID NO: 9019 - RNA, 19 nt, Artificial Sequence
  Synthetic
cggaaacaguauacagagu

SEQ ID NO: 9020 - RNA, 19 nt, Artificial Sequence
  Synthetic
gagaaaugaacccaaacua

SEQ ID NO: 9021 - RNA, 19 nt, Artificial Sequence
  Synthetic
acucaagaacugucaagua

SEQ ID NO: 9022 - RNA, 19 nt, Artificial Sequence
  Synthetic
ggagcaaaucagagaaaug

SEQ ID NO: 9023 - RNA, 19 nt, Artificial Sequence
  Synthetic
agggagcaaaucagagaaa

SEQ ID NO: 9024 - RNA, 19 nt, Artificial Sequence
  Synthetic
gaucugucuugaaggagaa

SEQ ID NO: 9025 - RNA, 19 nt, Artificial Sequence
  Synthetic
gcuagaucacuguaacaua

SEQ ID NO: 9026 - RNA, 19 nt, Artificial Sequence
  Synthetic
gggauagugguguggauca

SEQ ID NO: 9027 - RNA, 19 nt, Artificial Sequence
  Synthetic
acuggaagcuugugcacau

SEQ ID NO: 9028 - RNA, 19 nt, Artificial Sequence
  Synthetic
gaagucagcuauacagaca

SEQ ID NO: 9029 - RNA, 19 nt, Artificial Sequence
  Synthetic
gcaugaaaguuagcagaga

SEQ ID NO: 9030 - RNA, 19 nt, Artificial Sequence
  Synthetic
ggacccaaaugucaaacua

SEQ ID NO: 9031 - RNA, 19 nt, Artificial Sequence
  Synthetic
caggagaacuggucgccau

SEQ ID NO: 9032 - RNA, 19 nt, Artificial Sequence
  Synthetic
aagaagagccugagagcaa

SEQ ID NO: 9033 - RNA, 19 nt, Artificial Sequence
  Synthetic
ggaacaaggugcugaacca

SEQ ID NO: 9034 - RNA, 19 nt, Artificial Sequence
  Synthetic
aggaggaggaggagaagaa

SEQ ID NO: 9035 - RNA, 19 nt, Artificial Sequence
  Synthetic
gcaggaaguucaagggcau

SEQ ID NO: 9036 - RNA, 19 nt, Artificial Sequence
  Synthetic
gcaagaugaucaacgacaa

SEQ ID NO: 9037 - RNA, 19 nt, Artificial Sequence
  Synthetic
aggaggaggaggaggagaa

SEQ ID NO: 9038 - RNA, 19 nt, Artificial Sequence
  Synthetic
ggagaagaagcgcaggaaa

SEQ ID NO: 9039 - RNA, 19 nt, Artificial Sequence
  Synthetic
gagcaagggaagcggguga

SEQ ID NO: 9040 - RNA, 19 nt, Artificial Sequence
  Synthetic
gagaagaagcgcaggaaag

SEQ ID NO: 9041 - RNA, 19 nt, Artificial Sequence
  Synthetic
gagcgggacuugagcaaca

SEQ ID NO: 9042 - RNA, 19 nt, Artificial Sequence
  Synthetic
ccagaggagacgaaaggaa

SEQ ID NO: 9043 - RNA, 19 nt, Artificial Sequence
  Synthetic
gugcacaacugguacaauu

SEQ ID NO: 9044 - RNA, 19 nt, Artificial Sequence
  Synthetic
caucaagaagggaggcgua

SEQ ID NO: 9045 - RNA, 19 nt, Artificial Sequence
  Synthetic
ccacuaaggaccugcugaa

SEQ ID NO: 9046 - RNA, 19 nt, Artificial Sequence
  Synthetic
aagaagaagaagaaggguu

SEQ ID NO: 9047 - RNA, 19 nt, Artificial Sequence
  Synthetic
acgaggaugaggaggagaa

SEQ ID NO: 9048 - RNA, 19 nt, Artificial Sequence
  Synthetic
aggacaaggaggaggagga

SEQ ID NO: 9049 - RNA, 19 nt, Artificial Sequence
  Synthetic
caagaugaucaacgacaaa

SEQ ID NO: 9050 - RNA, 19 nt, Artificial Sequence
  Synthetic
aggagagugaggaggagaa

SEQ ID NO: 9051 - RNA, 19 nt, Artificial Sequence
  Synthetic
gcagugaguucaaccgcaa

SEQ ID NO: 9052 - RNA, 19 nt, Artificial Sequence
  Synthetic
cguucgaguuccuaagaau

SEQ ID NO: 9053 - RNA, 19 nt, Artificial Sequence
  Synthetic
gccaagagguggacuacau

SEQ ID NO: 9054 - RNA, 19 nt, Artificial Sequence
  Synthetic
gaggaggcucggaggaaga

SEQ ID NO: 9055 - RNA, 19 nt, Artificial Sequence
  Synthetic
augaggaggagaaggagaa

SEQ ID NO: 9056 - RNA, 19 nt, Artificial Sequence
  Synthetic
gagugggagaggaggaaca

SEQ ID NO: 9057 - RNA, 19 nt, Artificial Sequence
  Synthetic
acaaggaggaggaggagga

SEQ ID NO: 9058 - RNA, 19 nt, Artificial Sequence
  Synthetic
guucagacgacgaggccuu

SEQ ID NO: 9059 - RNA, 19 nt, Artificial Sequence
  Synthetic
aggaugaggaggagaagga

SEQ ID NO: 9060 - RNA, 19 nt, Artificial Sequence
  Synthetic
ggaggaagaaguacggcau

SEQ ID NO: 9061 - RNA, 19 nt, Artificial Sequence
  Synthetic
cccaguaagucuucaguuu

SEQ ID NO: 9062 - RNA, 19 nt, Artificial Sequence
  Synthetic
auaaagaacuggaagagaa

SEQ ID NO: 9063 - RNA, 19 nt, Artificial Sequence
  Synthetic
gcacaaauuugguaaguca

SEQ ID NO: 9064 - RNA, 19 nt, Artificial Sequence
  Synthetic
gacaagaaauggaagcuua

SEQ ID NO: 9065 - RNA, 19 nt, Artificial Sequence
  Synthetic
ccagcaacauggauggaaa

SEQ ID NO: 9066 - RNA, 19 nt, Artificial Sequence
  Synthetic
caaauaaagaacuggaaga

SEQ ID NO: 9067 - RNA, 19 nt, Artificial Sequence
  Synthetic
gggaauauauuugcagaaa

SEQ ID NO: 9068 - RNA, 19 nt, Artificial Sequence
  Synthetic
gaggaaagcaaauaaagaa

SEQ ID NO: 9069 - RNA, 19 nt, Artificial Sequence
  Synthetic
auauguagcuguuggagaa

SEQ ID NO: 9070 - RNA, 19 nt, Artificial Sequence
  Synthetic
ggagguaaauuaagacaga

SEQ ID NO: 9071 - RNA, 19 nt, Artificial Sequence
  Synthetic
gcuuauacacccaaguuaa

SEQ ID NO: 9072 - RNA, 19 nt, Artificial Sequence
  Synthetic
guaaagaaagugcgucaaa

SEQ ID NO: 9073 - RNA, 19 nt, Artificial Sequence
  Synthetic
gauccaacccaguuaguua

SEQ ID NO: 9074 - RNA, 19 nt, Artificial Sequence
  Synthetic
gugccaaaauagaugaaaa

SEQ ID NO: 9075 - RNA, 19 nt, Artificial Sequence
  Synthetic
ggaaacaguugucagaaga

SEQ ID NO: 9076 - RNA, 19 nt, Artificial Sequence
  Synthetic
gggaucaacuuaauguuua

SEQ ID NO: 9077 - RNA, 19 nt, Artificial Sequence
  Synthetic
caucauugguucuguguuu

SEQ ID NO: 9078 - RNA, 19 nt, Artificial Sequence
  Synthetic
gaacacagcaagccauaaa

SEQ ID NO: 9079 - RNA, 19 nt, Artificial Sequence
  Synthetic
uggaagagaagaacagaau

SEQ ID NO: 9080 - RNA, 19 nt, Artificial Sequence
  Synthetic
aggcaaagauagauuuaca

SEQ ID NO: 9081 - RNA, 19 nt, Artificial Sequence
  Synthetic
uuuaaagggugcauugaua

SEQ ID NO: 9082 - RNA, 19 nt, Artificial Sequence
  Synthetic
acagaaugcugcaagaaga

SEQ ID NO: 9083 - RNA, 19 nt, Artificial Sequence
  Synthetic
ucaagaagucagauaggua

SEQ ID NO: 9084 - RNA, 19 nt, Artificial Sequence
  Synthetic
ugaaagcacagcagugaaa

SEQ ID NO: 9085 - RNA, 19 nt, Artificial Sequence
  Synthetic
cagcagugaaagagcgaga

SEQ ID NO: 9086 - RNA, 19 nt, Artificial Sequence
  Synthetic
cugaagaaguuuugcugau

SEQ ID NO: 9087 - RNA, 19 nt, Artificial Sequence
  Synthetic
ccucauggcagaaagaauu

SEQ ID NO: 9088 - RNA, 19 nt, Artificial Sequence
  Synthetic
gaaaauuaguccagaagga

SEQ ID NO: 9089 - RNA, 19 nt, Artificial Sequence
  Synthetic
aaauuaguccagaaggaaa

SEQ ID NO: 9090 - RNA, 19 nt, Artificial Sequence
  Synthetic
cgaaauuacaagaguccau

SEQ ID NO: 9091 - RNA, 19 nt, Artificial Sequence
  Synthetic
cuguaacggucuaagauau

SEQ ID NO: 9092 - RNA, 19 nt, Artificial Sequence
  Synthetic
ggaugaaggaccagaaauu

SEQ ID NO: 9093 - RNA, 19 nt, Artificial Sequence
  Synthetic
cuuaaagggaagaggaaau

SEQ ID NO: 9094 - RNA, 19 nt, Artificial Sequence
  Synthetic
gauaaggaguuucaggaua

SEQ ID NO: 9095 - RNA, 19 nt, Artificial Sequence
  Synthetic
ucaaagaucucaagcacaa

SEQ ID NO: 9096 - RNA, 19 nt, Artificial Sequence
  Synthetic
guagaaugguggugaagau

SEQ ID NO: 9097 - RNA, 19 nt, Artificial Sequence
  Synthetic
ccauggaagugguggacau

SEQ ID NO: 9098 - RNA, 19 nt, Artificial Sequence
  Synthetic
gaaacauacuuaaagggaa

SEQ ID NO: 9099 - RNA, 19 nt, Artificial Sequence
  Synthetic
gggaagaggaaaugagacu

SEQ ID NO: 9100 - RNA, 19 nt, Artificial Sequence
  Synthetic
gauagaauacugugagaga

SEQ ID NO: 9101 - RNA, 19 nt, Artificial Sequence
  Synthetic
ucuacaagcugaaggguga

SEQ ID NO: 9102 - RNA, 19 nt, Artificial Sequence
  Synthetic
ugauguacuucuugguuaa

SEQ ID NO: 9103 - RNA, 19 nt, Artificial Sequence
  Synthetic
ggaaauagugagaggacgu

SEQ ID NO: 9104 - RNA, 19 nt, Artificial Sequence
  Synthetic
auaaggaguuucaggauau

SEQ ID NO: 9105 - RNA, 19 nt, Artificial Sequence
  Synthetic
caagaucgaugaugacaaa

SEQ ID NO: 9106 - RNA, 19 nt, Artificial Sequence
  Synthetic
uggaagaugcggugaauga

SEQ ID NO: 9107 - RNA, 19 nt, Artificial Sequence
  Synthetic
caagaaugguacagaaacu

SEQ ID NO: 9108 - RNA, 19 nt, Artificial Sequence
  Synthetic
cugcuggaguugugggaau

SEQ ID NO: 9109 - RNA, 19 nt, Artificial Sequence
  Synthetic
gugguuugccuaagagaaa

SEQ ID NO: 9110 - RNA, 19 nt, Artificial Sequence
  Synthetic
uggaaacagcagaggaaaa

SEQ ID NO: 9111 - RNA, 19 nt, Artificial Sequence
  Synthetic
aagacaggcagcagggaua

SEQ ID NO: 9112 - RNA, 19 nt, Artificial Sequence
  Synthetic
guauaaggacucacacaaa

SEQ ID NO: 9113 - RNA, 19 nt, Artificial Sequence
  Synthetic
ugacaaaagacgagauaca

SEQ ID NO: 9114 - RNA, 19 nt, Artificial Sequence
  Synthetic
uuaugaacuucgucagaaa

SEQ ID NO: 9115 - RNA, 19 nt, Artificial Sequence
  Synthetic
uggaauacuugcagcugaa

SEQ ID NO: 9116 - RNA, 19 nt, Artificial Sequence
  Synthetic
uuccaaggcuagugguaaa

SEQ ID NO: 9117 - RNA, 19 nt, Artificial Sequence
  Synthetic
gauccgacgucuacagcua

SEQ ID NO: 9118 - RNA, 19 nt, Artificial Sequence
  Synthetic
ccagauuuauucuuggaaa

SEQ ID NO: 9119 - RNA, 19 nt, Artificial Sequence
  Synthetic
cuguggacaccaagaaaua

SEQ ID NO: 9120 - RNA, 19 nt, Artificial Sequence
  Synthetic
aaggagauguguacagcua

SEQ ID NO: 9121 - RNA, 19 nt, Artificial Sequence
  Synthetic
aaacauacuuaaagggaag

SEQ ID NO: 9122 - RNA, 19 nt, Artificial Sequence
  Synthetic
ggguuuggcugaagaaauu

SEQ ID NO: 9123 - RNA, 19 nt, Artificial Sequence
  Synthetic
ucuacaagguggagacaau

SEQ ID NO: 9124 - RNA, 19 nt, Artificial Sequence
  Synthetic
aaauaaagcuggacuggau

SEQ ID NO: 9125 - RNA, 19 nt, Artificial Sequence
  Synthetic
ugggugaaauaaaggcaua

SEQ ID NO: 9126 - RNA, 19 nt, Artificial Sequence
  Synthetic
cggcagagaucgccaacau

SEQ ID NO: 9127 - RNA, 19 nt, Artificial Sequence
  Synthetic
ugggagggugggugaaaua

SEQ ID NO: 9128 - RNA, 19 nt, Artificial Sequence
  Synthetic
cuaguaaccuggaggaucu

SEQ ID NO: 9129 - RNA, 19 nt, Artificial Sequence
  Synthetic
uaucaagggaauaagguau

SEQ ID NO: 9130 - RNA, 19 nt, Artificial Sequence
  Synthetic
uggaaaagcagaagacaga

SEQ ID NO: 9131 - RNA, 19 nt, Artificial Sequence
  Synthetic
ggagggugggugaaauaaa

SEQ ID NO: 9132 - RNA, 19 nt, Artificial Sequence
  Synthetic
gcaucagccugcaggagau

SEQ ID NO: 9133 - RNA, 19 nt, Artificial Sequence
  Synthetic
gcacauagcuauccgccca

SEQ ID NO: 9134 - RNA, 19 nt, Artificial Sequence
  Synthetic
cggcugaagucacggaacu

SEQ ID NO: 9135 - RNA, 19 nt, Artificial Sequence
  Synthetic
caguggagcccgaguacuu

SEQ ID NO: 9136 - RNA, 19 nt, Artificial Sequence
  Synthetic
caucaucaugcaagaagua

SEQ ID NO: 9137 - RNA, 19 nt, Artificial Sequence
  Synthetic
ccuucgaccuguucaagaa

SEQ ID NO: 9138 - RNA, 19 nt, Artificial Sequence
  Synthetic
agagagaaauaaagcugga

SEQ ID NO: 9139 - RNA, 19 nt, Artificial Sequence
  Synthetic
gaauaagguaucugcacca

SEQ ID NO: 9140 - RNA, 19 nt, Artificial Sequence
  Synthetic
aggaaguggugcagagggu

SEQ ID NO: 9141 - RNA, 19 nt, Artificial Sequence
  Synthetic
ggagacaggguuuggcuga

SEQ ID NO: 9142 - RNA, 19 nt, Artificial Sequence
  Synthetic
gcauaguggauggcagauu

SEQ ID NO: 9143 - RNA, 19 nt, Artificial Sequence
  Synthetic
gcagauucguacucaagau

SEQ ID NO: 9144 - RNA, 19 nt, Artificial Sequence
  Synthetic
cgucuguggcugaggccuu

SEQ ID NO: 9145 - RNA, 19 nt, Artificial Sequence
  Synthetic
aggguuuggcugaagaaau

SEQ ID NO: 9146 - RNA, 19 nt, Artificial Sequence
  Synthetic
cgugcugguucgauccaaa

SEQ ID NO: 9147 - RNA, 19 nt, Artificial Sequence
  Synthetic
aaauaaaggcauacugucu

SEQ ID NO: 9148 - RNA, 19 nt, Artificial Sequence
  Synthetic
gagugagcccauugagguu

SEQ ID NO: 9149 - RNA, 19 nt, Artificial Sequence
  Synthetic
caacaucugcgguggagga

SEQ ID NO: 9150 - RNA, 19 nt, Artificial Sequence
  Synthetic
ccucgcucagagagaaaua

SEQ ID NO: 9151 - RNA, 19 nt, Artificial Sequence
  Synthetic
aggcaccugucgaguguau

SEQ ID NO: 9152 - RNA, 19 nt, Artificial Sequence
  Synthetic
gaacagagcucaagggcaa

SEQ ID NO: 9153 - RNA, 19 nt, Artificial Sequence
  Synthetic
gggcaaaggcacagaggaa

SEQ ID NO: 9154 - RNA, 19 nt, Artificial Sequence
  Synthetic
gcaaagggcuccaggauuu

SEQ ID NO: 9155 - RNA, 19 nt, Artificial Sequence
  Synthetic
ggacagauucaaauggaaa

SEQ ID NO: 9156 - RNA, 19 nt, Artificial Sequence
  Synthetic
gggaagaagaccaauauua

SEQ ID NO: 9157 - RNA, 19 nt, Artificial Sequence
  Synthetic
gcaaacauguccuuagaua

SEQ ID NO: 9158 - RNA, 19 nt, Artificial Sequence
  Synthetic
cugaagagcuggaaauuga

SEQ ID NO: 9159 - RNA, 19 nt, Artificial Sequence
  Synthetic
ggacugaagagcuggaaau

SEQ ID NO: 9160 - RNA, 19 nt, Artificial Sequence
  Synthetic
ggacuugcgucaugagaau

SEQ ID NO: 9161 - RNA, 19 nt, Artificial Sequence
  Synthetic
gcagaaaggcaguugguga

SEQ ID NO: 9162 - RNA, 19 nt, Artificial Sequence
  Synthetic
cauagaggaugcaaagaaa

SEQ ID NO: 9163 - RNA, 19 nt, Artificial Sequence
  Synthetic
cagaauaacucuccaguau

SEQ ID NO: 9164 - RNA, 19 nt, Artificial Sequence
  Synthetic
uagaagacauacugacaaa

SEQ ID NO: 9165 - RNA, 19 nt, Artificial Sequence
  Synthetic
gcauaaucaucauguguau

SEQ ID NO: 9166 - RNA, 19 nt, Artificial Sequence
  Synthetic
aaaggcaguuggugagaaa

SEQ ID NO: 9167 - RNA, 19 nt, Artificial Sequence
  Synthetic
gcuuguaacugucaugaaa

SEQ ID NO: 9168 - RNA, 19 nt, Artificial Sequence
  Synthetic
gauggaaucuacaggcuua

SEQ ID NO: 9169 - RNA, 19 nt, Artificial Sequence
  Synthetic
ucgcacaagccaugaauaa

SEQ ID NO: 9170 - RNA, 19 nt, Artificial Sequence
  Synthetic
gcaaagaaauggacacacu

SEQ ID NO: 9171 - RNA, 19 nt, Artificial Sequence
  Synthetic
ccagauggccucaggauuu

SEQ ID NO: 9172 - RNA, 19 nt, Artificial Sequence
  Synthetic
ggaagaagaccaauauuau

SEQ ID NO: 9173 - RNA, 19 nt, Artificial Sequence
  Synthetic
gagcaauauucuagcaacu

SEQ ID NO: 9174 - RNA, 19 nt, Artificial Sequence
  Synthetic
gauuauggcuuuaacgaca

SEQ ID NO: 9175 - RNA, 19 nt, Artificial Sequence
  Synthetic
gcgauuagccauugagcga

SEQ ID NO: 9176 - RNA, 19 nt, Artificial Sequence
  Synthetic
gcucaagggcaaaggcaca

SEQ ID NO: 9177 - RNA, 19 nt, Artificial Sequence
  Synthetic
ucgaaaugaugaaggacuu

SEQ ID NO: 9178 - RNA, 19 nt, Artificial Sequence
  Synthetic
gaggaaaccuucuggcuga

SEQ ID NO: 9179 - RNA, 19 nt, Artificial Sequence
  Synthetic
cagccucgcuccugggaaa

SEQ ID NO: 9180 - RNA, 19 nt, Artificial Sequence
  Synthetic
ggaauuuucucuugggcuu

SEQ ID NO: 9181 - RNA, 19 nt, Artificial Sequence
  Synthetic
ggcugaggcugcagaacaa

SEQ ID NO: 9182 - RNA, 19 nt, Artificial Sequence
  Synthetic
gggcugacauccuaauaaa

SEQ ID NO: 9183 - RNA, 19 nt, Artificial Sequence
  Synthetic
aggagaacggcaaagauua

SEQ ID NO: 9184 - RNA, 19 nt, Artificial Sequence
  Synthetic
ggugaugcagcgugacaua

SEQ ID NO: 9185 - RNA, 19 nt, Artificial Sequence
  Synthetic
gaggagaacggcaaagauu

SEQ ID NO: 9186 - RNA, 19 nt, Artificial Sequence
  Synthetic
gggaggugaugcagcguga

SEQ ID NO: 9187 - RNA, 19 nt, Artificial Sequence
  Synthetic
ggaaaucaagaaagcucaa

SEQ ID NO: 9188 - RNA, 19 nt, Artificial Sequence
  Synthetic
cggcagcgcaacacugaaa

SEQ ID NO: 9189 - RNA, 19 nt, Artificial Sequence
  Synthetic
caagaaagcucaaaggacc

SEQ ID NO: 9190 - RNA, 19 nt, Artificial Sequence
  Synthetic
ccgaggagagccuggugaa

SEQ ID NO: 9191 - RNA, 19 nt, Artificial Sequence
  Synthetic
cggcgaggagaacggcaaa

SEQ ID NO: 9192 - RNA, 19 nt, Artificial Sequence
  Synthetic
aggccuacgcagagcugaa

SEQ ID NO: 9193 - RNA, 19 nt, Artificial Sequence
  Synthetic
ggaccagggcagcagcauu

SEQ ID NO: 9194 - RNA, 19 nt, Artificial Sequence
  Synthetic
ucgaggacccugugcaaga

SEQ ID NO: 9195 - RNA, 19 nt, Artificial Sequence
  Synthetic
ggagaacggcaaagauuac

SEQ ID NO: 9196 - RNA, 19 nt, Artificial Sequence
  Synthetic
ucucugaggaaaucaagaa

SEQ ID NO: 9197 - RNA, 19 nt, Artificial Sequence
  Synthetic
cugaggaaaucaagaaagc

SEQ ID NO: 9198 - RNA, 19 nt, Artificial Sequence
  Synthetic
auggacagacccaaacaua

SEQ ID NO: 9199 - RNA, 19 nt, Artificial Sequence
  Synthetic
gaggugaugcagcgugaca

SEQ ID NO: 9200 - RNA, 19 nt, Artificial Sequence
  Synthetic
gcgaggagaacggcaaaga

SEQ ID NO: 9201 - RNA, 19 nt, Artificial Sequence
  Synthetic
cgaggagaacggcaaagau

SEQ ID NO: 9202 - RNA, 19 nt, Artificial Sequence
  Synthetic
ggacagacccaaacauagc

SEQ ID NO: 9203 - RNA, 19 nt, Artificial Sequence
  Synthetic
gcugacauccuaauaaaau

SEQ ID NO: 9204 - RNA, 19 nt, Artificial Sequence
  Synthetic
cggcuugcucugcucuuua

SEQ ID NO: 9205 - RNA, 19 nt, Artificial Sequence
  Synthetic
ugaaggaggcgcucucuga

SEQ ID NO: 9206 - RNA, 19 nt, Artificial Sequence
  Synthetic
ucaucgagcaugccgaguu

SEQ ID NO: 9207 - RNA, 19 nt, Artificial Sequence
  Synthetic
caucgagcaugccgaguuc

SEQ ID NO: 9208 - RNA, 19 nt, Artificial Sequence
  Synthetic
ggcuucagcgugucccaua

SEQ ID NO: 9209 - RNA, 19 nt, Artificial Sequence
  Synthetic
caucaaggccaccgaucug

SEQ ID NO: 9210 - RNA, 19 nt, Artificial Sequence
  Synthetic
gaccagggcagcagcauug

SEQ ID NO: 9211 - RNA, 19 nt, Artificial Sequence
  Synthetic
ccaugaaccgcaucugugu

SEQ ID NO: 9212 - RNA, 19 nt, Artificial Sequence
  Synthetic
uggcaaacaugaagagaaa

SEQ ID NO: 9213 - RNA, 19 nt, Artificial Sequence
  Synthetic
ccagauagccugacagaua

SEQ ID NO: 9214 - RNA, 19 nt, Artificial Sequence
  Synthetic
gcaaacaugaagagaaaca

SEQ ID NO: 9215 - RNA, 19 nt, Artificial Sequence
  Synthetic
cagauaggcuagugguauu

SEQ ID NO: 9216 - RNA, 19 nt, Artificial Sequence
  Synthetic
gcagugaaugcaaggguua

SEQ ID NO: 9217 - RNA, 19 nt, Artificial Sequence
  Synthetic
ggauagcgcaauuggcaaa

SEQ ID NO: 9218 - RNA, 19 nt, Artificial Sequence
  Synthetic
ucuaagaacuucacaaaga

SEQ ID NO: 9219 - RNA, 19 nt, Artificial Sequence
  Synthetic
gaacucagauuuagugcaa

SEQ ID NO: 9220 - RNA, 19 nt, Artificial Sequence
  Synthetic
cagaggaguugauggugaa

SEQ ID NO: 9221 - RNA, 19 nt, Artificial Sequence
  Synthetic
ccagaaggagccagaagaa

SEQ ID NO: 9222 - RNA, 19 nt, Artificial Sequence
  Synthetic
ucucaaaguuuccacauua

SEQ ID NO: 9223 - RNA, 19 nt, Artificial Sequence
  Synthetic
ggaaagugugugugaaugu

SEQ ID NO: 9224 - RNA, 19 nt, Artificial Sequence
  Synthetic
uuucggaagcugaagaaua

SEQ ID NO: 9225 - RNA, 19 nt, Artificial Sequence
  Synthetic
aaugaaacccaguagcuaa

SEQ ID NO: 9226 - RNA, 19 nt, Artificial Sequence
  Synthetic
ccuggauaguguaguggua

SEQ ID NO: 9227 - RNA, 19 nt, Artificial Sequence
  Synthetic
ggagagagcaguuucaaca

SEQ ID NO: 9228 - RNA, 19 nt, Artificial Sequence
  Synthetic
uucggaagcugaagaauaa

SEQ ID NO: 9229 - RNA, 19 nt, Artificial Sequence
  Synthetic
cuaagaacuucacaaagaa

SEQ ID NO: 9230 - RNA, 19 nt, Artificial Sequence
  Synthetic
ggugaagaccaaagaugga

SEQ ID NO: 9231 - RNA, 19 nt, Artificial Sequence
  Synthetic
gcacgaggcccuggguuua

SEQ ID NO: 9232 - RNA, 19 nt, Artificial Sequence
  Synthetic
gcugggagccugucaguuu

SEQ ID NO: 9233 - RNA, 19 nt, Artificial Sequence
  Synthetic
uaauaaaggagcugacguu

SEQ ID NO: 9234 - RNA, 19 nt, Artificial Sequence
  Synthetic
agaaggagccagaagaagu

SEQ ID NO: 9235 - RNA, 19 nt, Artificial Sequence
  Synthetic
uaucuuacuugcagugaau

SEQ ID NO: 9236 - RNA, 19 nt, Artificial Sequence
  Synthetic
aggaagagcuccaguauua

SEQ ID NO: 9237 - RNA, 19 nt, Artificial Sequence
  Synthetic
gaacaauccuuuagugcaa

SEQ ID NO: 9238 - RNA, 19 nt, Artificial Sequence
  Synthetic
gcaacaagcugaagauuau

SEQ ID NO: 9239 - RNA, 19 nt, Artificial Sequence
  Synthetic
ugacaaauucugagagcaa

SEQ ID NO: 9240 - RNA, 19 nt, Artificial Sequence
  Synthetic
ggaaacagucagagagaca

SEQ ID NO: 9241 - RNA, 19 nt, Artificial Sequence
  Synthetic
ccaccaagcaagagaggaa

SEQ ID NO: 9242 - RNA, 19 nt, Artificial Sequence
  Synthetic
cagaggaggucaagaggaa

SEQ ID NO: 9243 - RNA, 19 nt, Artificial Sequence
  Synthetic
agaaagaggaagugaaaca

SEQ ID NO: 9244 - RNA, 19 nt, Artificial Sequence
  Synthetic
caagaaagaggaagugaaa

SEQ ID NO: 9245 - RNA, 19 nt, Artificial Sequence
  Synthetic
ggaagagucuaaagaauau

SEQ ID NO: 9246 - RNA, 19 nt, Artificial Sequence
  Synthetic
ggacaaagcagaauugauu

SEQ ID NO: 9247 - RNA, 19 nt, Artificial Sequence
  Synthetic
agacagagauggcaacaua

SEQ ID NO: 9248 - RNA, 19 nt, Artificial Sequence
  Synthetic
uggaagagucuaaagaaua

SEQ ID NO: 9249 - RNA, 19 nt, Artificial Sequence
  Synthetic
aggcagagcaagaagcaaa

SEQ ID NO: 9250 - RNA, 19 nt, Artificial Sequence
  Synthetic
ccaaagaaggcaacacaaa

SEQ ID NO: 9251 - RNA, 19 nt, Artificial Sequence
  Synthetic
ggagaaggcaugcaaguua

SEQ ID NO: 9252 - RNA, 19 nt, Artificial Sequence
  Synthetic
cagcgaaggcggugaaaga

SEQ ID NO: 9253 - RNA, 19 nt, Artificial Sequence
  Synthetic
ugagaaugagcgugggaaa

SEQ ID NO: 9254 - RNA, 19 nt, Artificial Sequence
  Synthetic
cugcacaagaggaaagaaa

SEQ ID NO: 9255 - RNA, 19 nt, Artificial Sequence
  Synthetic
gagagaaaguacaacagaa

SEQ ID NO: 9256 - RNA, 19 nt, Artificial Sequence
  Synthetic
ggaaaggacuuauggagca

SEQ ID NO: 9257 - RNA, 19 nt, Artificial Sequence
  Synthetic
ggagcugauuggagaauuu

SEQ ID NO: 9258 - RNA, 19 nt, Artificial Sequence
  Synthetic
ggcaacaagcugaagauua

SEQ ID NO: 9259 - RNA, 19 nt, Artificial Sequence
  Synthetic
gccuaugggaccagaaaua

SEQ ID NO: 9260 - RNA, 19 nt, Artificial Sequence
  Synthetic
ccaagaaagaggaagugaa

SEQ ID NO: 9261 - RNA, 19 nt, Artificial Sequence
  Synthetic
ggaauuugccagugacaau

SEQ ID NO: 9262 - RNA, 19 nt, Artificial Sequence
  Synthetic
gauuauaacucuagaggcu

SEQ ID NO: 9263 - RNA, 19 nt, Artificial Sequence
  Synthetic
gcuaaaggguacaagggau

SEQ ID NO: 9264 - RNA, 19 nt, Artificial Sequence
  Synthetic
gguauuaugccaagaucua

SEQ ID NO: 9265 - RNA, 19 nt, Artificial Sequence
  Synthetic
gagaaguaccugagaucau

SEQ ID NO: 9266 - RNA, 19 nt, Artificial Sequence
  Synthetic
ucaaagagcuggagaagua

SEQ ID NO: 9267 - RNA, 19 nt, Artificial Sequence
  Synthetic
guagagaagaugaggguua

SEQ ID NO: 9268 - RNA, 19 nt, Artificial Sequence
  Synthetic
gggauggaguggaggauau

SEQ ID NO: 9269 - RNA, 19 nt, Artificial Sequence
  Synthetic
ccaagaaacaggugaauuu

SEQ ID NO: 9270 - RNA, 19 nt, Artificial Sequence
  Synthetic
gagucaacacagaggauaa

SEQ ID NO: 9271 - RNA, 19 nt, Artificial Sequence
  Synthetic
aaacaaaggagaaggugaa

SEQ ID NO: 9272 - RNA, 19 nt, Artificial Sequence
  Synthetic
gagaaagagggaagaagaa

SEQ ID NO: 9273 - RNA, 19 nt, Artificial Sequence
  Synthetic
caacaugagugaagagguu

SEQ ID NO: 9274 - RNA, 19 nt, Artificial Sequence
  Synthetic
gcucagugucccaaagaaa

SEQ ID NO: 9275 - RNA, 19 nt, Artificial Sequence
  Synthetic
ggaagagugagaagauaua

SEQ ID NO: 9276 - RNA, 19 nt, Artificial Sequence
  Synthetic
cagacaaauuucagaugua

SEQ ID NO: 9277 - RNA, 19 nt, Artificial Sequence
  Synthetic
gagauaaggaaauggguga

SEQ ID NO: 9278 - RNA, 19 nt, Artificial Sequence
  Synthetic
gugcaagaguuauuggaau

SEQ ID NO: 9279 - RNA, 19 nt, Artificial Sequence
  Synthetic
gcaacauguuccaagcaaa

SEQ ID NO: 9280 - RNA, 19 nt, Artificial Sequence
  Synthetic
aggaacugcugaaagaaua

SEQ ID NO: 9281 - RNA, 19 nt, Artificial Sequence
  Synthetic
ugacagaauaagacaggaa

SEQ ID NO: 9282 - RNA, 19 nt, Artificial Sequence
  Synthetic
ccagaagccuugggagaaa

SEQ ID NO: 9283 - RNA, 19 nt, Artificial Sequence
  Synthetic
cccucaagcuggagaagaa

SEQ ID NO: 9284 - RNA, 19 nt, Artificial Sequence
  Synthetic
gcagggagauaccgugaaa

SEQ ID NO: 9285 - RNA, 19 nt, Artificial Sequence
  Synthetic
gagaaagaugccugggaga

SEQ ID NO: 9286 - RNA, 19 nt, Artificial Sequence
  Synthetic
cugcaucccugguguguaa

SEQ ID NO: 9287 - RNA, 19 nt, Artificial Sequence
  Synthetic
guguaagauugcugacuuu

SEQ ID NO: 9288 - RNA, 19 nt, Artificial Sequence
  Synthetic
ggagauaccgugaaacauu

SEQ ID NO: 9289 - RNA, 19 nt, Artificial Sequence
  Synthetic
agacagugcaggacgagaa

SEQ ID NO: 9290 - RNA, 19 nt, Artificial Sequence
  Synthetic
cgggauagcgagaccacua

SEQ ID NO: 9291 - RNA, 19 nt, Artificial Sequence
  Synthetic
ucgaauacauccagagugu

SEQ ID NO: 9292 - RNA, 19 nt, Artificial Sequence
  Synthetic
ucacggaguucauggccaa

SEQ ID NO: 9293 - RNA, 19 nt, Artificial Sequence
  Synthetic
agggagauaccgugaaaca

SEQ ID NO: 9294 - RNA, 19 nt, Artificial Sequence
  Synthetic
ggaacuacauccaccgaga

SEQ ID NO: 9295 - RNA, 19 nt, Artificial Sequence
  Synthetic
ggagcacaucagaggcuua

SEQ ID NO: 9296 - RNA, 19 nt, Artificial Sequence
  Synthetic
gagauaccgugaaacauua

SEQ ID NO: 9297 - RNA, 19 nt, Artificial Sequence
  Synthetic
cgaugaagccagggagcau

SEQ ID NO: 9298 - RNA, 19 nt, Artificial Sequence
  Synthetic
ugauggagaucgucaccua

SEQ ID NO: 9299 - RNA, 19 nt, Artificial Sequence
  Synthetic
ugucaaacccugaagugau

SEQ ID NO: 9300 - RNA, 19 nt, Artificial Sequence
  Synthetic
aggcaggcucugaggacau

SEQ ID NO: 9301 - RNA, 19 nt, Artificial Sequence
  Synthetic
gggaagggacucagacagu

SEQ ID NO: 9302 - RNA, 19 nt, Artificial Sequence
  Synthetic
caugaugcgcugcuggaaa

SEQ ID NO: 9303 - RNA, 19 nt, Artificial Sequence
  Synthetic
ccacagagagccaguacca

SEQ ID NO: 9304 - RNA, 19 nt, Artificial Sequence
  Synthetic
ccgugaaacauuacaagau

SEQ ID NO: 9305 - RNA, 19 nt, Artificial Sequence
  Synthetic
ccuaauagccacaacagca

SEQ ID NO: 9306 - RNA, 19 nt, Artificial Sequence
  Synthetic
gcaugucgguggaggccuu

SEQ ID NO: 9307 - RNA, 19 nt, Artificial Sequence
  Synthetic
cuaauagccacaacagcaa

SEQ ID NO: 9308 - RNA, 19 nt, Artificial Sequence
  Synthetic
ggucaaacuucaugcggug

SEQ ID NO: 9309 - RNA, 19 nt, Artificial Sequence
  Synthetic
ccuucaucgagcagaggaa

SEQ ID NO: 9310 - RNA, 19 nt, Artificial Sequence
  Synthetic
ucauugaggacaacgagua

SEQ ID NO: 9311 - RNA, 19 nt, Artificial Sequence
  Synthetic
ggagaagaaacuuggagcu

SEQ ID NO: 9312 - RNA, 19 nt, Artificial Sequence
  Synthetic
aggaagaggacaacaaaua

SEQ ID NO: 9313 - RNA, 19 nt, Artificial Sequence
  Synthetic
ggauaaugcuguaccgauu

SEQ ID NO: 9314 - RNA, 19 nt, Artificial Sequence
  Synthetic
ggucuaaugucaucaguua

SEQ ID NO: 9315 - RNA, 19 nt, Artificial Sequence
  Synthetic
ggacugaagccaaggucua

SEQ ID NO: 9316 - RNA, 19 nt, Artificial Sequence
  Synthetic
cugaugaggaagaggacaa

SEQ ID NO: 9317 - RNA, 19 nt, Artificial Sequence
  Synthetic
gcuuaagacaccugaagaa

SEQ ID NO: 9318 - RNA, 19 nt, Artificial Sequence
  Synthetic
caacaaagcauucuggauu

SEQ ID NO: 9319 - RNA, 19 nt, Artificial Sequence
  Synthetic
cuacagaccuggagggaac

SEQ ID NO: 9320 - RNA, 19 nt, Artificial Sequence
  Synthetic
gaugcagauaagagaauua

SEQ ID NO: 9321 - RNA, 19 nt, Artificial Sequence
  Synthetic
ucacaauugaugcagauaa

SEQ ID NO: 9322 - RNA, 19 nt, Artificial Sequence
  Synthetic
gagaauacauugaucuguu

SEQ ID NO: 9323 - RNA, 19 nt, Artificial Sequence
  Synthetic
gaggauggauaaugcugua

SEQ ID NO: 9324 - RNA, 19 nt, Artificial Sequence
  Synthetic
gcaauaagacuaagccagu

SEQ ID NO: 9325 - RNA, 19 nt, Artificial Sequence
  Synthetic
gaacuggagacuggaauaa

SEQ ID NO: 9326 - RNA, 19 nt, Artificial Sequence
  Synthetic
ugaacuggagacuggaaua

SEQ ID NO: 9327 - RNA, 19 nt, Artificial Sequence
  Synthetic
gcucacaauugaugcagau

SEQ ID NO: 9328 - RNA, 19 nt, Artificial Sequence
  Synthetic
gcuuagaugacauggcuca

SEQ ID NO: 9329 - RNA, 19 nt, Artificial Sequence
  Synthetic
gauuaaagagggugggaaa

SEQ ID NO: 9330 - RNA, 19 nt, Artificial Sequence
  Synthetic
ccaucaagauccugaagaa

SEQ ID NO: 9331 - RNA, 19 nt, Artificial Sequence
  Synthetic
agacagggauuaagucaaa

SEQ ID NO: 9332 - RNA, 19 nt, Artificial Sequence
  Synthetic
cggacgaggaggaggaaca

SEQ ID NO: 9333 - RNA, 19 nt, Artificial Sequence
  Synthetic
cuggcggacuggagaaaua

SEQ ID NO: 9334 - RNA, 19 nt, Artificial Sequence
  Synthetic
aaguauugguggaguguga

SEQ ID NO: 9335 - RNA, 19 nt, Artificial Sequence
  Synthetic
ucauugaccuguugaagaa

SEQ ID NO: 9336 - RNA, 19 nt, Artificial Sequence
  Synthetic
acaaagacaacuagguuuu

SEQ ID NO: 9337 - RNA, 19 nt, Artificial Sequence
  Synthetic
agucaaaagaagcaagaaa

SEQ ID NO: 9338 - RNA, 19 nt, Artificial Sequence
  Synthetic
gcgacauguugguagaaaa

SEQ ID NO: 9339 - RNA, 19 nt, Artificial Sequence
  Synthetic
guguacagccagagcaaga

SEQ ID NO: 9340 - RNA, 19 nt, Artificial Sequence
  Synthetic
ggacaaagacaacuagguu

SEQ ID NO: 9341 - RNA, 19 nt, Artificial Sequence
  Synthetic
ggagagugccgaugacuau

SEQ ID NO: 9342 - RNA, 19 nt, Artificial Sequence
  Synthetic
ccgccaaggucaaccagua

SEQ ID NO: 9343 - RNA, 19 nt, Artificial Sequence
  Synthetic
ggguuugccugcugaauau

SEQ ID NO: 9344 - RNA, 19 nt, Artificial Sequence
  Synthetic
gggcuguguuauugcagaa

SEQ ID NO: 9345 - RNA, 19 nt, Artificial Sequence
  Synthetic
ucgagauguuggagcagaa

SEQ ID NO: 9346 - RNA, 19 nt, Artificial Sequence
  Synthetic
aggaggaggaacagaaaca

SEQ ID NO: 9347 - RNA, 19 nt, Artificial Sequence
  Synthetic
ggugggaaaucuaugguuu

SEQ ID NO: 9348 - RNA, 19 nt, Artificial Sequence
  Synthetic
caacaaugccaaugccuuu

SEQ ID NO: 9349 - RNA, 19 nt, Artificial Sequence
  Synthetic
agacaaccauacagaguca

SEQ ID NO: 9350 - RNA, 19 nt, Artificial Sequence
  Synthetic
gcgaggagaucgagaacac

SEQ ID NO: 9351 - RNA, 19 nt, Artificial Sequence
  Synthetic
ugaagaagaugcugaccau

SEQ ID NO: 9352 - RNA, 19 nt, Artificial Sequence
  Synthetic
aagcagagacagggauuaa

SEQ ID NO: 9353 - RNA, 19 nt, Artificial Sequence
  Synthetic
gcagagaagagaacauuuu

SEQ ID NO: 9354 - RNA, 19 nt, Artificial Sequence
  Synthetic
ggagcgacauguugguaga

SEQ ID NO: 9355 - RNA, 19 nt, Artificial Sequence
  Synthetic
gugaacaugacgacagauu

SEQ ID NO: 9356 - RNA, 19 nt, Artificial Sequence
  Synthetic
cauacagagucaaggucau

SEQ ID NO: 9357 - RNA, 19 nt, Artificial Sequence
  Synthetic
ccaaugagaucguagccau

SEQ ID NO: 9358 - RNA, 19 nt, Artificial Sequence
  Synthetic
ccucuaagcacgcuggcua

SEQ ID NO: 9359 - RNA, 19 nt, Artificial Sequence
  Synthetic
cuacagagcuccagagauu

SEQ ID NO: 9360 - RNA, 19 nt, Artificial Sequence
  Synthetic
ggaaagaugucgaggaagu

SEQ ID NO: 9361 - RNA, 19 nt, Artificial Sequence
  Synthetic
gauuaaagacauuggaaga

SEQ ID NO: 9362 - RNA, 19 nt, Artificial Sequence
  Synthetic
caagaaaguaguugugaua

SEQ ID NO: 9363 - RNA, 19 nt, Artificial Sequence
  Synthetic
guauagaaacacaggacaa

SEQ ID NO: 9364 - RNA, 19 nt, Artificial Sequence
  Synthetic
ggaaguaaguuguauagaa

SEQ ID NO: 9365 - RNA, 19 nt, Artificial Sequence
  Synthetic
gcugauugaugcagauuua

SEQ ID NO: 9366 - RNA, 19 nt, Artificial Sequence
  Synthetic
gaacagagguauuuuggua

SEQ ID NO: 9367 - RNA, 19 nt, Artificial Sequence
  Synthetic
gguagaaacuuuggaaauu

SEQ ID NO: 9368 - RNA, 19 nt, Artificial Sequence
  Synthetic
caucaagaguggaauggaa

SEQ ID NO: 9369 - RNA, 19 nt, Artificial Sequence
  Synthetic
ugggaaagaugucgaggaa

SEQ ID NO: 9370 - RNA, 19 nt, Artificial Sequence
  Synthetic
uggaagagcaugaggcaga

SEQ ID NO: 9371 - RNA, 19 nt, Artificial Sequence
  Synthetic
ccgaugagcauauggcaaa

SEQ ID NO: 9372 - RNA, 19 nt, Artificial Sequence
  Synthetic
ugguagaaacuuuggaaau

SEQ ID NO: 9373 - RNA, 19 nt, Artificial Sequence
  Synthetic
caggaagagaggaaauaaa

SEQ ID NO: 9374 - RNA, 19 nt, Artificial Sequence
  Synthetic
cagaaggagaggcaagaaa

SEQ ID NO: 9375 - RNA, 19 nt, Artificial Sequence
  Synthetic
cauucugguuggagauuaa

SEQ ID NO: 9376 - RNA, 19 nt, Artificial Sequence
  Synthetic
ugagaaagcugauagaaga

SEQ ID NO: 9377 - RNA, 19 nt, Artificial Sequence
  Synthetic
agagugaggaguuggauaa

SEQ ID NO: 9378 - RNA, 19 nt, Artificial Sequence
  Synthetic
ggguagugcuuuucagaca

SEQ ID NO: 9379 - RNA, 19 nt, Artificial Sequence
  Synthetic
cggcagccuuacaggguua

SEQ ID NO: 9380 - RNA, 19 nt, Artificial Sequence
  Synthetic
ggaaugaagucuaaagaag

SEQ ID NO: 9381 - RNA, 19 nt, Artificial Sequence
  Synthetic
agacauuggaagagcauga

SEQ ID NO: 9382 - RNA, 19 nt, Artificial Sequence
  Synthetic
cugaaaaugcugaugaaua

SEQ ID NO: 9383 - RNA, 19 nt, Artificial Sequence
  Synthetic
gauugaagcgcaagaguga

SEQ ID NO: 9384 - RNA, 19 nt, Artificial Sequence
  Synthetic
gcaagaaaguaguugugau

SEQ ID NO: 9385 - RNA, 19 nt, Artificial Sequence
  Synthetic
ugaagaaacucaaaguaga

SEQ ID NO: 9386 - RNA, 19 nt, Artificial Sequence
  Synthetic
ccguguaccucaagaccua

SEQ ID NO: 9387 - RNA, 19 nt, Artificial Sequence
  Synthetic
aagaaauugcugugaaaca

SEQ ID NO: 9388 - RNA, 19 nt, Artificial Sequence
  Synthetic
agucuaaagaagccagaaa

SEQ ID NO: 9389 - RNA, 19 nt, Artificial Sequence
  Synthetic
ucaucgaggucuugggcaa

SEQ ID NO: 9390 - RNA, 19 nt, Artificial Sequence
  Synthetic
gcaugguggagcugaucaa

SEQ ID NO: 9391 - RNA, 19 nt, Artificial Sequence
  Synthetic
acgccgaccucaagagcau

SEQ ID NO: 9392 - RNA, 19 nt, Artificial Sequence
  Synthetic
ccagauugagacagugaau

SEQ ID NO: 9393 - RNA, 19 nt, Artificial Sequence
  Synthetic
aggagaaggcaccagguau

SEQ ID NO: 9394 - RNA, 19 nt, Artificial Sequence
  Synthetic
aguacgaccaggugcgcua

SEQ ID NO: 9395 - RNA, 19 nt, Artificial Sequence
  Synthetic
gggaggaaggagagcaucu

SEQ ID NO: 9396 - RNA, 19 nt, Artificial Sequence
  Synthetic
agaaugacgccuaccgcaa

SEQ ID NO: 9397 - RNA, 19 nt, Artificial Sequence
  Synthetic
gcagcugggaggaaggaga

SEQ ID NO: 9398 - RNA, 19 nt, Artificial Sequence
  Synthetic
caguguggccagucggcua

SEQ ID NO: 9399 - RNA, 19 nt, Artificial Sequence
  Synthetic
cuggagaauggcugaguga

SEQ ID NO: 9400 - RNA, 19 nt, Artificial Sequence
  Synthetic
cugaagaggcccacgucau

SEQ ID NO: 9401 - RNA, 19 nt, Artificial Sequence
  Synthetic
gcaacaacgaguacgacca

SEQ ID NO: 9402 - RNA, 19 nt, Artificial Sequence
  Synthetic
gagacugacugcuacgaca

SEQ ID NO: 9403 - RNA, 19 nt, Artificial Sequence
  Synthetic
ggagaauggcugagugagc

SEQ ID NO: 9404 - RNA, 19 nt, Artificial Sequence
  Synthetic
uggccauccugcagcgaga

SEQ ID NO: 9405 - RNA, 19 nt, Artificial Sequence
  Synthetic
acgacaucaucgaggucuu

SEQ ID NO: 9406 - RNA, 19 nt, Artificial Sequence
  Synthetic
gcaagugaaucaugagaaa

SEQ ID NO: 9407 - RNA, 19 nt, Artificial Sequence
  Synthetic
ggacagaguuugacaggga

SEQ ID NO: 9408 - RNA, 19 nt, Artificial Sequence
  Synthetic
gggaagagcuguuugauca

SEQ ID NO: 9409 - RNA, 19 nt, Artificial Sequence
  Synthetic
gaaaauccguagugggaaa

SEQ ID NO: 9410 - RNA, 19 nt, Artificial Sequence
  Synthetic
acaaaggguuuuaaggcaa

SEQ ID NO: 9411 - RNA, 19 nt, Artificial Sequence
  Synthetic
aaaggaagaucaaggacaa

SEQ ID NO: 9412 - RNA, 19 nt, Artificial Sequence
  Synthetic
gggaggauguguaucaaua

SEQ ID NO: 9413 - RNA, 19 nt, Artificial Sequence
  Synthetic
ggucaaacugcuuaacaaa

SEQ ID NO: 9414 - RNA, 19 nt, Artificial Sequence
  Synthetic
acaacaaugccgugguuaa

SEQ ID NO: 9415 - RNA, 19 nt, Artificial Sequence
  Synthetic
gcucaaaacucuaccacaa

SEQ ID NO: 9416 - RNA, 19 nt, Artificial Sequence
  Synthetic
gcaacaaggacuucaacua

SEQ ID NO: 9417 - RNA, 19 nt, Artificial Sequence
  Synthetic
acauggaguccgagguuua

SEQ ID NO: 9418 - RNA, 19 nt, Artificial Sequence
  Synthetic
agaaguuaccugugggauu

SEQ ID NO: 9419 - RNA, 19 nt, Artificial Sequence
  Synthetic
gagaagaugaucaguggua

SEQ ID NO: 9420 - RNA, 19 nt, Artificial Sequence
  Synthetic
gagugugggcauagcauua

SEQ ID NO: 9421 - RNA, 19 nt, Artificial Sequence
  Synthetic
ucacggagcugaaggauga

SEQ ID NO: 9422 - RNA, 19 nt, Artificial Sequence
  Synthetic
caaaugaagaacaagcaaa

SEQ ID NO: 9423 - RNA, 19 nt, Artificial Sequence
  Synthetic
gagcccaaaugaagaacaa

SEQ ID NO: 9424 - RNA, 19 nt, Artificial Sequence
  Synthetic
ccuaaaugcugggaaacaa

SEQ ID NO: 9425 - RNA, 19 nt, Artificial Sequence
  Synthetic
ccacaaugccaaagaaauc

SEQ ID NO: 9426 - RNA, 19 nt, Artificial Sequence
  Synthetic
gcuacauggaggagaugaa

SEQ ID NO: 9427 - RNA, 19 nt, Artificial Sequence
  Synthetic
ggaaacaaagguaugagaa

SEQ ID NO: 9428 - RNA, 19 nt, Artificial Sequence
  Synthetic
cgguggaaaugcacaacaa

SEQ ID NO: 9429 - RNA, 19 nt, Artificial Sequence
  Synthetic
uggcugcgguuguggauaa

SEQ ID NO: 9430 - RNA, 19 nt, Artificial Sequence
  Synthetic
gcacauugaucugguggaa

SEQ ID NO: 9431 - RNA, 19 nt, Artificial Sequence
  Synthetic
gagcagauguggucaaacu

SEQ ID NO: 9432 - RNA, 19 nt, Artificial Sequence
  Synthetic
aaacaaagguaugagaaga

SEQ ID NO: 9433 - RNA, 19 nt, Artificial Sequence
  Synthetic
agaugaagaacguggagau

SEQ ID NO: 9434 - RNA, 19 nt, Artificial Sequence
  Synthetic
ugggagauuucauggagaa

SEQ ID NO: 9435 - RNA, 19 nt, Artificial Sequence
  Synthetic
caacaaggacuucaacuaa

SEQ ID NO: 9436 - RNA, 19 nt, Artificial Sequence
  Synthetic
gggugaaaguaacggacaa

SEQ ID NO: 9437 - RNA, 19 nt, Artificial Sequence
  Synthetic
uggcuaacuucauggauaa

SEQ ID NO: 9438 - RNA, 19 nt, Artificial Sequence
  Synthetic
gggcggauguguaucaaua

SEQ ID NO: 9439 - RNA, 19 nt, Artificial Sequence
  Synthetic
ggaugaagguagaaaugga

SEQ ID NO: 9440 - RNA, 19 nt, Artificial Sequence
  Synthetic
ccagaagacauuagagcau

SEQ ID NO: 9441 - RNA, 19 nt, Artificial Sequence
  Synthetic
cgaggauggcaguggcaaa

SEQ ID NO: 9442 - RNA, 19 nt, Artificial Sequence
  Synthetic
agguggagauggagaauca

SEQ ID NO: 9443 - RNA, 19 nt, Artificial Sequence
  Synthetic
cgacauucgcacugaguuu

SEQ ID NO: 9444 - RNA, 19 nt, Artificial Sequence
  Synthetic
uggauaagcuacaaaucaa

SEQ ID NO: 9445 - RNA, 19 nt, Artificial Sequence
  Synthetic
gaguggagaugcacaacaa

SEQ ID NO: 9446 - RNA, 19 nt, Artificial Sequence
  Synthetic
cuggcuaacuucauggaua

SEQ ID NO: 9447 - RNA, 19 nt, Artificial Sequence
  Synthetic
ucucauggaccaagggauu

SEQ ID NO: 9448 - RNA, 19 nt, Artificial Sequence
  Synthetic
gaaagcaacuguuugagaa

SEQ ID NO: 9449 - RNA, 19 nt, Artificial Sequence
  Synthetic
ggacuuugauaucgacauu

SEQ ID NO: 9450 - RNA, 19 nt, Artificial Sequence
  Synthetic
ccgcaaggagauggagaaa

SEQ ID NO: 9451 - RNA, 19 nt, Artificial Sequence
  Synthetic
gagaaaaugaucaguggaa

SEQ ID NO: 9452 - RNA, 19 nt, Artificial Sequence
  Synthetic
ggauaagcuacaaaucaaa

SEQ ID NO: 9453 - RNA, 19 nt, Artificial Sequence
  Synthetic
ggaacugguggaaggagaa

SEQ ID NO: 9454 - RNA, 19 nt, Artificial Sequence
  Synthetic
caugaugaccugugguuau

SEQ ID NO: 9455 - RNA, 19 nt, Artificial Sequence
  Synthetic
gcagaagguugaccaguau

SEQ ID NO: 9456 - RNA, 19 nt, Artificial Sequence
  Synthetic
ccaaagacaucucagacau

SEQ ID NO: 9457 - RNA, 19 nt, Artificial Sequence
  Synthetic
uggaacugguggaaggaga

SEQ ID NO: 9458 - RNA, 19 nt, Artificial Sequence
  Synthetic
cgaaaugugaugugucuuu

SEQ ID NO: 9459 - RNA, 19 nt, Artificial Sequence
  Synthetic
cgggaaagcaacuguuuga

SEQ ID NO: 9460 - RNA, 19 nt, Artificial Sequence
  Synthetic
gcaaggagauggagaaagg

SEQ ID NO: 9461 - RNA, 19 nt, Artificial Sequence
  Synthetic
ggaccuuggaggaacaaau

SEQ ID NO: 9462 - RNA, 19 nt, Artificial Sequence
  Synthetic
ggagauggagaaagggcuu

SEQ ID NO: 9463 - RNA, 19 nt, Artificial Sequence
  Synthetic
caagcagagguucgagaaa

SEQ ID NO: 9464 - RNA, 19 nt, Artificial Sequence
  Synthetic
gcucacugaacccgggaaa

SEQ ID NO: 9465 - RNA, 19 nt, Artificial Sequence
  Synthetic
gggacgagcucuuugacca

SEQ ID NO: 9466 - RNA, 19 nt, Artificial Sequence
  Synthetic
gggcacagcuacagcagau

SEQ ID NO: 9467 - RNA, 19 nt, Artificial Sequence
  Synthetic
agaaguagcacucagguua

SEQ ID NO: 9468 - RNA, 19 nt, Artificial Sequence
  Synthetic
uggcagugcuggacgaaga

SEQ ID NO: 9469 - RNA, 19 nt, Artificial Sequence
  Synthetic
gcacagaugcggaaggcca

SEQ ID NO: 9470 - RNA, 19 nt, Artificial Sequence
  Synthetic
gccaagaugucgugagucu

SEQ ID NO: 9471 - RNA, 19 nt, Artificial Sequence
  Synthetic
gggaagaaacccugaguug

SEQ ID NO: 9472 - RNA, 19 nt, Artificial Sequence
  Synthetic
gugcagaucaccagcgaga

SEQ ID NO: 9473 - RNA, 19 nt, Artificial Sequence
  Synthetic
ccacauccuuuuacauuua

SEQ ID NO: 9474 - RNA, 19 nt, Artificial Sequence
  Synthetic
ugacaagggcacagcuaca

SEQ ID NO: 9475 - RNA, 19 nt, Artificial Sequence
  Synthetic
caucagacugcgagggcca

SEQ ID NO: 9476 - RNA, 19 nt, Artificial Sequence
  Synthetic
gcagcauccuccuggaaca

SEQ ID NO: 9477 - RNA, 19 nt, Artificial Sequence
  Synthetic
gggccaagaugucgugagu

SEQ ID NO: 9478 - RNA, 19 nt, Artificial Sequence
  Synthetic
ugaacuggaccaaggguuu

SEQ ID NO: 9479 - RNA, 19 nt, Artificial Sequence
  Synthetic
ggucaggccgugugagguu

SEQ ID NO: 9480 - RNA, 19 nt, Artificial Sequence
  Synthetic
cugccgugguggagaagau

SEQ ID NO: 9481 - RNA, 19 nt, Artificial Sequence
  Synthetic
gcaguugacucgugucuga

SEQ ID NO: 9482 - RNA, 19 nt, Artificial Sequence
  Synthetic
augcgcagccugugaacaa

SEQ ID NO: 9483 - RNA, 19 nt, Artificial Sequence
  Synthetic
ggugacaagggcacagcua

SEQ ID NO: 9484 - RNA, 19 nt, Artificial Sequence
  Synthetic
gcaacaaacacuccagguu

SEQ ID NO: 9485 - RNA, 19 nt, Artificial Sequence
  Synthetic
caugauguccuguggcuau

SEQ ID NO: 9486 - RNA, 19 nt, Artificial Sequence
  Synthetic
ggcaagcagagguuugaaa

SEQ ID NO: 9487 - RNA, 19 nt, Artificial Sequence
  Synthetic
gcccagaagccaggaguuu

SEQ ID NO: 9488 - RNA, 19 nt, Artificial Sequence
  Synthetic
cccacauggcacugagcaa

SEQ ID NO: 9489 - RNA, 19 nt, Artificial Sequence
  Synthetic
gagaaguagcacucagguu

SEQ ID NO: 9490 - RNA, 19 nt, Artificial Sequence
  Synthetic
gaagaaacccugaguugcu

SEQ ID NO: 9491 - RNA, 19 nt, Artificial Sequence
  Synthetic
uagcugccgugguggagaa

SEQ ID NO: 9492 - RNA, 19 nt, Artificial Sequence
  Synthetic
ccacaggcgugcagaucac

SEQ ID NO: 9493 - RNA, 19 nt, Artificial Sequence
  Synthetic
gcaagcagagguuugaaaa

SEQ ID NO: 9494 - RNA, 19 nt, Artificial Sequence
  Synthetic
gacaggcaguggagcugaa

SEQ ID NO: 9495 - RNA, 19 nt, Artificial Sequence
  Synthetic
cacucagguuagcaauaua

SEQ ID NO: 9496 - RNA, 19 nt, Artificial Sequence
  Synthetic
gaucugaagccaagaaaua

SEQ ID NO: 9497 - RNA, 19 nt, Artificial Sequence
  Synthetic
ggaagaggacagagagcaa

SEQ ID NO: 9498 - RNA, 19 nt, Artificial Sequence
  Synthetic
ggaauaaauuagaugguca

SEQ ID NO: 9499 - RNA, 19 nt, Artificial Sequence
  Synthetic
guaguuaacuggaauguaa

SEQ ID NO: 9500 - RNA, 19 nt, Artificial Sequence
  Synthetic
guauacaaggucaggaaua

SEQ ID NO: 9501 - RNA, 19 nt, Artificial Sequence
  Synthetic
gauuaagggugcaacuaaa

SEQ ID NO: 9502 - RNA, 19 nt, Artificial Sequence
  Synthetic
auuggauagucgagagaaa

SEQ ID NO: 9503 - RNA, 19 nt, Artificial Sequence
  Synthetic
gggugagggaugacggaaa

SEQ ID NO: 9504 - RNA, 19 nt, Artificial Sequence
  Synthetic
gaugaagauaauagagcaa

SEQ ID NO: 9505 - RNA, 19 nt, Artificial Sequence
  Synthetic
guucaagacagguguuuaa

SEQ ID NO: 9506 - RNA, 19 nt, Artificial Sequence
  Synthetic
cagaaauccagguguuaaa

SEQ ID NO: 9507 - RNA, 19 nt, Artificial Sequence
  Synthetic
cagaauaacaagucgguga

SEQ ID NO: 9508 - RNA, 19 nt, Artificial Sequence
  Synthetic
gaacuaaagaagcagcuaa

SEQ ID NO: 9509 - RNA, 19 nt, Artificial Sequence
  Synthetic
agagcaaugugguguuaaa

SEQ ID NO: 9510 - RNA, 19 nt, Artificial Sequence
  Synthetic
ugaagauaauagagcaaga

SEQ ID NO: 9511 - RNA, 19 nt, Artificial Sequence
  Synthetic
cauaagagaaucuggugaa

SEQ ID NO: 9512 - RNA, 19 nt, Artificial Sequence
  Synthetic
cagcagaaauccagguguu

SEQ ID NO: 9513 - RNA, 19 nt, Artificial Sequence
  Synthetic
gcacagacauccuacagaa

SEQ ID NO: 9514 - RNA, 19 nt, Artificial Sequence
  Synthetic
auaacaagucggugaagua

SEQ ID NO: 9515 - RNA, 19 nt, Artificial Sequence
  Synthetic
agaaauggagcgagcagaa

SEQ ID NO: 9516 - RNA, 19 nt, Artificial Sequence
  Synthetic
gaguauacaaggucaggaa

SEQ ID NO: 9517 - RNA, 19 nt, Artificial Sequence
  Synthetic
aagagaaucuggugaacuu

SEQ ID NO: 9518 - RNA, 19 nt, Artificial Sequence
  Synthetic
ccaauuuagucauaagaga

SEQ ID NO: 9519 - RNA, 19 nt, Artificial Sequence
  Synthetic
ugguagaagguguguuuua

SEQ ID NO: 9520 - RNA, 19 nt, Artificial Sequence
  Synthetic
cagacauccuacagaagaa

SEQ ID NO: 9521 - RNA, 19 nt, Artificial Sequence
  Synthetic
ccuccuuucucaagacaaa

SEQ ID NO: 9522 - RNA, 19 nt, Artificial Sequence
  Synthetic
cuacaucacaacagagcua

SEQ ID NO: 9523 - RNA, 19 nt, Artificial Sequence
  Synthetic
uugcagaacuaaagaagca

SEQ ID NO: 9524 - RNA, 19 nt, Artificial Sequence
  Synthetic
uauacaaggucaggaauaa

SEQ ID NO: 9525 - RNA, 19 nt, Artificial Sequence
  Synthetic
agagagaguucgucaggau

SEQ ID NO: 9526 - RNA, 19 nt, Artificial Sequence
  Synthetic
cuacauggcuccagaagua

SEQ ID NO: 9527 - RNA, 19 nt, Artificial Sequence
  Synthetic
gggcugaguucacgaauua

SEQ ID NO: 9528 - RNA, 19 nt, Artificial Sequence
  Synthetic
agaagaagcgauuggcaaa

SEQ ID NO: 9529 - RNA, 19 nt, Artificial Sequence
  Synthetic
aauaagauccuguguguaa

SEQ ID NO: 9530 - RNA, 19 nt, Artificial Sequence
  Synthetic
caaugaaguacaugaacaa

SEQ ID NO: 9531 - RNA, 19 nt, Artificial Sequence
  Synthetic
gcaaugaaguacaugaaca

SEQ ID NO: 9532 - RNA, 19 nt, Artificial Sequence
  Synthetic
uggaguaucuucagaggua

SEQ ID NO: 9533 - RNA, 19 nt, Artificial Sequence
  Synthetic
cagaaguauuccaggugua

SEQ ID NO: 9534 - RNA, 19 nt, Artificial Sequence
  Synthetic
gaaaauggguucacacaaa

SEQ ID NO: 9535 - RNA, 19 nt, Artificial Sequence
  Synthetic
guaaagggaguuuuggaaa

SEQ ID NO: 9536 - RNA, 19 nt, Artificial Sequence
  Synthetic
aagaagaagcgauuggcaa

SEQ ID NO: 9537 - RNA, 19 nt, Artificial Sequence
  Synthetic
cggcagcaacggcggaaua

SEQ ID NO: 9538 - RNA, 19 nt, Artificial Sequence
  Synthetic
gguaaagggaguuuuggaa

SEQ ID NO: 9539 - RNA, 19 nt, Artificial Sequence
  Synthetic
gguagugaaaggagcagaa

SEQ ID NO: 9540 - RNA, 19 nt, Artificial Sequence
  Synthetic
ggaagucgcccuaggaaca

SEQ ID NO: 9541 - RNA, 19 nt, Artificial Sequence
  Synthetic
cauuugagcuugaagagau

SEQ ID NO: 9542 - RNA, 19 nt, Artificial Sequence
  Synthetic
gaagcgagacacuaagaaa

SEQ ID NO: 9543 - RNA, 19 nt, Artificial Sequence
  Synthetic
gggaggaauucaucauauu

SEQ ID NO: 9544 - RNA, 19 nt, Artificial Sequence
  Synthetic
ggccauugguaaagggagu

SEQ ID NO: 9545 - RNA, 19 nt, Artificial Sequence
  Synthetic
aagcagaagugcaucgaga

SEQ ID NO: 9546 - RNA, 19 nt, Artificial Sequence
  Synthetic
acaucaagccagacaauau

SEQ ID NO: 9547 - RNA, 19 nt, Artificial Sequence
  Synthetic
gggagaacccaauuaggua

SEQ ID NO: 9548 - RNA, 19 nt, Artificial Sequence
  Synthetic
cuuaagaugaugaugguuu

SEQ ID NO: 9549 - RNA, 19 nt, Artificial Sequence
  Synthetic
gcaaaauaaaggucugaua

SEQ ID NO: 9550 - RNA, 19 nt, Artificial Sequence
  Synthetic
ggaguuacaggguuaaaua

SEQ ID NO: 9551 - RNA, 19 nt, Artificial Sequence
  Synthetic
ggcuggaggccguacgaaa

SEQ ID NO: 9552 - RNA, 19 nt, Artificial Sequence
  Synthetic
cccaauaaagggagguuga

SEQ ID NO: 9553 - RNA, 19 nt, Artificial Sequence
  Synthetic
uguucaagguggagcgugu

SEQ ID NO: 9554 - RNA, 19 nt, Artificial Sequence
  Synthetic
ccuuugaacuggaagaugu

SEQ ID NO: 9555 - RNA, 19 nt, Artificial Sequence
  Synthetic
gggagaagcuugccuuuga

SEQ ID NO: 9556 - RNA, 19 nt, Artificial Sequence
  Synthetic
uggcggagcuggagaacau

SEQ ID NO: 9557 - RNA, 19 nt, Artificial Sequence
  Synthetic
cccaggagcaggagagcaa

SEQ ID NO: 9558 - RNA, 19 nt, Artificial Sequence
  Synthetic
aggccauggaggagggcaa

SEQ ID NO: 9559 - RNA, 19 nt, Artificial Sequence
  Synthetic
guggugaggcagagggaca

SEQ ID NO: 9560 - RNA, 19 nt, Artificial Sequence
  Synthetic
ccacgcaucuuuaggguga

SEQ ID NO: 9561 - RNA, 19 nt, Artificial Sequence
  Synthetic
uaucaaaggugaaagaacu

SEQ ID NO: 9562 - RNA, 19 nt, Artificial Sequence
  Synthetic
ggaaccagcuggcagagaa

SEQ ID NO: 9563 - RNA, 19 nt, Artificial Sequence
  Synthetic
gaggaaaaccggaggcuga

SEQ ID NO: 9564 - RNA, 19 nt, Artificial Sequence
  Synthetic
ugacgcagcugcagggaca

SEQ ID NO: 9565 - RNA, 19 nt, Artificial Sequence
  Synthetic
gcuggagaacauagaggua

SEQ ID NO: 9566 - RNA, 19 nt, Artificial Sequence
  Synthetic
ucaaggaggcuuacgacaa

SEQ ID NO: 9567 - RNA, 19 nt, Artificial Sequence
  Synthetic
gcugaagagggcugagaca

SEQ ID NO: 9568 - RNA, 19 nt, Artificial Sequence
  Synthetic
ccaugaaaaugcugcacaa

SEQ ID NO: 9569 - RNA, 19 nt, Artificial Sequence
  Synthetic
gagcuuagccucagcgagu

SEQ ID NO: 9570 - RNA, 19 nt, Artificial Sequence
  Synthetic
cgaaacaggcacaggcacu

SEQ ID NO: 9571 - RNA, 19 nt, Artificial Sequence
  Synthetic
ggaaggaagagcuggccga

SEQ ID NO: 9572 - RNA, 19 nt, Artificial Sequence
  Synthetic
ccuuccaagacgaggagua

SEQ ID NO: 9573 - RNA, 19 nt, Artificial Sequence
  Synthetic
cagagaaggacgaguucga

SEQ ID NO: 9574 - RNA, 19 nt, Artificial Sequence
  Synthetic
cggaggagcagcagaagca

SEQ ID NO: 9575 - RNA, 19 nt, Artificial Sequence
  Synthetic
gcagggagaugcugaagga

SEQ ID NO: 9576 - RNA, 19 nt, Artificial Sequence
  Synthetic
aguccuugguggaaaccua

SEQ ID NO: 9577 - RNA, 19 nt, Artificial Sequence
  Synthetic
ccaccaagauggcagagga

SEQ ID NO: 9578 - RNA, 19 nt, Artificial Sequence
  Synthetic
ucaugaaccacgaggacca

SEQ ID NO: 9579 - RNA, 19 nt, Artificial Sequence
  Synthetic
acacacucaaggaggcuua

SEQ ID NO: 9580 - RNA, 19 nt, Artificial Sequence
  Synthetic
ccacaaggcauggaggaga

SEQ ID NO: 9581 - RNA, 19 nt, Artificial Sequence
  Synthetic
cagaaugggugcagaccgu

SEQ ID NO: 9582 - RNA, 19 nt, Artificial Sequence
  Synthetic
uuugagaucuugaagguga

SEQ ID NO: 9583 - RNA, 19 nt, Artificial Sequence
  Synthetic
gcugaguccuugguggaaa

SEQ ID NO: 9584 - RNA, 19 nt, Artificial Sequence
  Synthetic
caguagggacgccggacua

SEQ ID NO: 9585 - RNA, 19 nt, Artificial Sequence
  Synthetic
caacacagccucuacagaa

SEQ ID NO: 9586 - RNA, 19 nt, Artificial Sequence
  Synthetic
ccagaggaguugaugguga

SEQ ID NO: 9587 - RNA, 19 nt, Artificial Sequence
  Synthetic
cuggaaagugugugugaau

SEQ ID NO: 9588 - RNA, 19 nt, Artificial Sequence
  Synthetic
augaagagaaacagcaaga

SEQ ID NO: 9589 - RNA, 19 nt, Artificial Sequence
  Synthetic
acaugaagagaaacagcaa

SEQ ID NO: 9590 - RNA, 19 nt, Artificial Sequence
  Synthetic
cuggcaaacaugaagagaa

SEQ ID NO: 9591 - RNA, 19 nt, Artificial Sequence
  Synthetic
acagcaagaagguggcauu

SEQ ID NO: 9592 - RNA, 19 nt, Artificial Sequence
  Synthetic
ggaugaagaugaagacaaa

SEQ ID NO: 9593 - RNA, 19 nt, Artificial Sequence
  Synthetic
ggaagauguuggagaagau

SEQ ID NO: 9594 - RNA, 19 nt, Artificial Sequence
  Synthetic
gcauggagaugaagucaaa

SEQ ID NO: 9595 - RNA, 19 nt, Artificial Sequence
  Synthetic
gcuacaauuggaagagaaa

SEQ ID NO: 9596 - RNA, 19 nt, Artificial Sequence
  Synthetic
uggaaauacuauagagucu

SEQ ID NO: 9597 - RNA, 19 nt, Artificial Sequence
  Synthetic
cagaauacgaagaugaaaa

SEQ ID NO: 9598 - RNA, 19 nt, Artificial Sequence
  Synthetic
gagaaaaggauauggaaca

SEQ ID NO: 9599 - RNA, 19 nt, Artificial Sequence
  Synthetic
ugggagaaaugaagauaau

SEQ ID NO: 9600 - RNA, 19 nt, Artificial Sequence
  Synthetic
caucauuagcugaaaguuu

SEQ ID NO: 9601 - RNA, 19 nt, Artificial Sequence
  Synthetic
cagaagauagugaggauga

SEQ ID NO: 9602 - RNA, 19 nt, Artificial Sequence
  Synthetic
ggaugguggaggaaugaaa

SEQ ID NO: 9603 - RNA, 19 nt, Artificial Sequence
  Synthetic
ggaagaacucaguaaaaua

SEQ ID NO: 9604 - RNA, 19 nt, Artificial Sequence
  Synthetic
aggaugaagaugaagacaa

SEQ ID NO: 9605 - RNA, 19 nt, Artificial Sequence
  Synthetic
gguuggaagugaaggaacu

SEQ ID NO: 9606 - RNA, 19 nt, Artificial Sequence
  Synthetic
agucaaaauuggagaaacu

SEQ ID NO: 9607 - RNA, 19 nt, Artificial Sequence
  Synthetic
cguuagucuuccaaauaaa

SEQ ID NO: 9608 - RNA, 19 nt, Artificial Sequence
  Synthetic
gggaccaugccuuggguaa

SEQ ID NO: 9609 - RNA, 19 nt, Artificial Sequence
  Synthetic
gcugaaaguuugagagcug

SEQ ID NO: 9610 - RNA, 19 nt, Artificial Sequence
  Synthetic
ggaagaaaggagagggccu

SEQ ID NO: 9611 - RNA, 19 nt, Artificial Sequence
  Synthetic
ugauagugaaccagaggaa

SEQ ID NO: 9612 - RNA, 19 nt, Artificial Sequence
  Synthetic
ggcggaagguggagaaguu

SEQ ID NO: 9613 - RNA, 19 nt, Artificial Sequence
  Synthetic
auauaaagauagagcugga

SEQ ID NO: 9614 - RNA, 19 nt, Artificial Sequence
  Synthetic
ggucggaagauguuggaga

SEQ ID NO: 9615 - RNA, 19 nt, Artificial Sequence
  Synthetic
acaagaaacuggagcgcua

SEQ ID NO: 9616 - RNA, 19 nt, Artificial Sequence
  Synthetic
ggagcaaacuugaggauca

SEQ ID NO: 9617 - RNA, 19 nt, Artificial Sequence
  Synthetic
gggagaagguggccauaaa

SEQ ID NO: 9618 - RNA, 19 nt, Artificial Sequence
  Synthetic
gcaaagacaaauaggauau

SEQ ID NO: 9619 - RNA, 19 nt, Artificial Sequence
  Synthetic
gcaaauaauaguacaggua

SEQ ID NO: 9620 - RNA, 19 nt, Artificial Sequence
  Synthetic
cuucauaacuguucacaaa

SEQ ID NO: 9621 - RNA, 19 nt, Artificial Sequence
  Synthetic
ggaccaagaucaaaccaaa

SEQ ID NO: 9622 - RNA, 19 nt, Artificial Sequence
  Synthetic
gcuacuagaugaagacaau

SEQ ID NO: 9623 - RNA, 19 nt, Artificial Sequence
  Synthetic
ccagaagaugguagacaaa

SEQ ID NO: 9624 - RNA, 19 nt, Artificial Sequence
  Synthetic
cuaaguacguugcaaauaa

SEQ ID NO: 9625 - RNA, 19 nt, Artificial Sequence
  Synthetic
ugacagagcgggacagaau

SEQ ID NO: 9626 - RNA, 19 nt, Artificial Sequence
  Synthetic
agaagaugguagacaaaga

SEQ ID NO: 9627 - RNA, 19 nt, Artificial Sequence
  Synthetic
ggagagaugagaagcaauu

SEQ ID NO: 9628 - RNA, 19 nt, Artificial Sequence
  Synthetic
ccacagagacuugaagaua

SEQ ID NO: 9629 - RNA, 19 nt, Artificial Sequence
  Synthetic
ugauaagaagagagccaaa

SEQ ID NO: 9630 - RNA, 19 nt, Artificial Sequence
  Synthetic
gaaacaugcuaaugauuga

SEQ ID NO: 9631 - RNA, 19 nt, Artificial Sequence
  Synthetic
ggucauaaguaaggacuau

SEQ ID NO: 9632 - RNA, 19 nt, Artificial Sequence
  Synthetic
ccgcaauauuuuccgcaaa

SEQ ID NO: 9633 - RNA, 19 nt, Artificial Sequence
  Synthetic
gccguuagcuuguggagaa

SEQ ID NO: 9634 - RNA, 19 nt, Artificial Sequence
  Synthetic
uagaugaccucuugaaauu

SEQ ID NO: 9635 - RNA, 19 nt, Artificial Sequence
  Synthetic
gcgcuauuugucagggaaa

SEQ ID NO: 9636 - RNA, 19 nt, Artificial Sequence
  Synthetic
ugaccgagaagcuggguua

SEQ ID NO: 9637 - RNA, 19 nt, Artificial Sequence
  Synthetic
gaacaauaucacagucauu

SEQ ID NO: 9638 - RNA, 19 nt, Artificial Sequence
  Synthetic
acacaaagaauggcaguua

SEQ ID NO: 9639 - RNA, 19 nt, Artificial Sequence
  Synthetic
uuaagaggcuauuggguuu

SEQ ID NO: 9640 - RNA, 19 nt, Artificial Sequence
  Synthetic
gagaaggugaggagcauuu

SEQ ID NO: 9641 - RNA, 19 nt, Artificial Sequence
  Synthetic
acagagacuugaagauaga

SEQ ID NO: 9642 - RNA, 19 nt, Artificial Sequence
  Synthetic
gcacaagaucuaugagaag

SEQ ID NO: 9643 - RNA, 19 nt, Artificial Sequence
  Synthetic
gaacgugacuucuagauuu

SEQ ID NO: 9644 - RNA, 19 nt, Artificial Sequence
  Synthetic
gguggcaguucaagaagaa

SEQ ID NO: 9645 - RNA, 19 nt, Artificial Sequence
  Synthetic
ugaaauggguaaaggacaa

SEQ ID NO: 9646 - RNA, 19 nt, Artificial Sequence
  Synthetic
guucaagccuccugaguaa

SEQ ID NO: 9647 - RNA, 19 nt, Artificial Sequence
  Synthetic
cagcaaagcuucagaaaau

SEQ ID NO: 9648 - RNA, 19 nt, Artificial Sequence
  Synthetic
guacagggcuccagaagua

SEQ ID NO: 9649 - RNA, 19 nt, Artificial Sequence
  Synthetic
caguauaagaaauggcaua

SEQ ID NO: 9650 - RNA, 19 nt, Artificial Sequence
  Synthetic
gagauugacagaugagaua

SEQ ID NO: 9651 - RNA, 19 nt, Artificial Sequence
  Synthetic
gggaagaagcauugagucu

SEQ ID NO: 9652 - RNA, 19 nt, Artificial Sequence
  Synthetic
gcaagacccuucugaaaua

SEQ ID NO: 9653 - RNA, 19 nt, Artificial Sequence
  Synthetic
caagacaacacaagaauua

SEQ ID NO: 9654 - RNA, 19 nt, Artificial Sequence
  Synthetic
agaaggauauugacggaua

SEQ ID NO: 9655 - RNA, 19 nt, Artificial Sequence
  Synthetic
ugguuuggcccgagaaaua

SEQ ID NO: 9656 - RNA, 19 nt, Artificial Sequence
  Synthetic
gagauaaagccaaagagua

SEQ ID NO: 9657 - RNA, 19 nt, Artificial Sequence
  Synthetic
gagcaaauggauuguuuaa

SEQ ID NO: 9658 - RNA, 19 nt, Artificial Sequence
  Synthetic
ggugagaaauaguacagaa

SEQ ID NO: 9659 - RNA, 19 nt, Artificial Sequence
  Synthetic
gagaaauaguacagaauac

SEQ ID NO: 9660 - RNA, 19 nt, Artificial Sequence
  Synthetic
ggauuuauguaggaagaaa

SEQ ID NO: 9661 - RNA, 19 nt, Artificial Sequence
  Synthetic
ucuauugguuccaggauaa

SEQ ID NO: 9662 - RNA, 19 nt, Artificial Sequence
  Synthetic
ggucuuauuuccaggucaa

SEQ ID NO: 9663 - RNA, 19 nt, Artificial Sequence
  Synthetic
gaccagaacuugugaaaau

SEQ ID NO: 9664 - RNA, 19 nt, Artificial Sequence
  Synthetic
caacaaaggauucagauga

SEQ ID NO: 9665 - RNA, 19 nt, Artificial Sequence
  Synthetic
gcaucauggcagaaguuua

SEQ ID NO: 9666 - RNA, 19 nt, Artificial Sequence
  Synthetic
agauaaagccaaagaguag

SEQ ID NO: 9667 - RNA, 19 nt, Artificial Sequence
  Synthetic
aagccaaagaguaggagaa

SEQ ID NO: 9668 - RNA, 19 nt, Artificial Sequence
  Synthetic
gggagaagcaggauacuuu

SEQ ID NO: 9669 - RNA, 19 nt, Artificial Sequence
  Synthetic
cagaaaggcauccuggaaa

SEQ ID NO: 9670 - RNA, 19 nt, Artificial Sequence
  Synthetic
agaaaggcauccuggaaaa

SEQ ID NO: 9671 - RNA, 19 nt, Artificial Sequence
  Synthetic
ccaaagggcccuaaccuaa

SEQ ID NO: 9672 - RNA, 19 nt, Artificial Sequence
  Synthetic
uggaaaaucuucagggaca

SEQ ID NO: 9673 - RNA, 19 nt, Artificial Sequence
  Synthetic
gcucucaacaugaagguua

SEQ ID NO: 9674 - RNA, 19 nt, Artificial Sequence
  Synthetic
aaagaaguuaucagggaaa

SEQ ID NO: 9675 - RNA, 19 nt, Artificial Sequence
  Synthetic
ggccagaaauggagaauaa

SEQ ID NO: 9676 - RNA, 19 nt, Artificial Sequence
  Synthetic
cggaagagcuggagacaga

SEQ ID NO: 9677 - RNA, 19 nt, Artificial Sequence
  Synthetic
cuucagagcuggagaacuu

SEQ ID NO: 9678 - RNA, 19 nt, Artificial Sequence
  Synthetic
gcacggugaucgagggcua

SEQ ID NO: 9679 - RNA, 19 nt, Artificial Sequence
  Synthetic
gagagagccuccugugaaa

SEQ ID NO: 9680 - RNA, 19 nt, Artificial Sequence
  Synthetic
ugaccaaucucaaggauau

SEQ ID NO: 9681 - RNA, 19 nt, Artificial Sequence
  Synthetic
ucuccaaggccgaggacua

SEQ ID NO: 9682 - RNA, 19 nt, Artificial Sequence
  Synthetic
gcaccaucuucaagggcaa

SEQ ID NO: 9683 - RNA, 19 nt, Artificial Sequence
  Synthetic
ggagaauaauccaguccua

SEQ ID NO: 9684 - RNA, 19 nt, Artificial Sequence
  Synthetic
ucagauggccggagagauu

SEQ ID NO: 9685 - RNA, 19 nt, Artificial Sequence
  Synthetic
ccgagaaggaggaggcuga

SEQ ID NO: 9686 - RNA, 19 nt, Artificial Sequence
  Synthetic
ccuccaagccugagcaaga

SEQ ID NO: 9687 - RNA, 19 nt, Artificial Sequence
  Synthetic
caacagagcacuugagaac

SEQ ID NO: 9688 - RNA, 19 nt, Artificial Sequence
  Synthetic
ugacaacacuuaauagcaa

SEQ ID NO: 9689 - RNA, 19 nt, Artificial Sequence
  Synthetic
gaaaggaagcggagagaug

SEQ ID NO: 9690 - RNA, 19 nt, Artificial Sequence
  Synthetic
ggugaaagaugaaccugaa

SEQ ID NO: 9691 - RNA, 19 nt, Artificial Sequence
  Synthetic
ccaaggguguggugaaaga

SEQ ID NO: 9692 - RNA, 19 nt, Artificial Sequence
  Synthetic
gggaaugggucguggacag

SEQ ID NO: 9693 - RNA, 19 nt, Artificial Sequence
  Synthetic
aguuaaucgugaaguggaa

SEQ ID NO: 9694 - RNA, 19 nt, Artificial Sequence
  Synthetic
gggcgugcaccgagaacaa

SEQ ID NO: 9695 - RNA, 19 nt, Artificial Sequence
  Synthetic
agaaggaggaggcugaaua

SEQ ID NO: 9696 - RNA, 19 nt, Artificial Sequence
  Synthetic
ggaaacucuucuacaacua

SEQ ID NO: 9697 - RNA, 19 nt, Artificial Sequence
  Synthetic
ucucaaggauauugggcuu

SEQ ID NO: 9698 - RNA, 19 nt, Artificial Sequence
  Synthetic
ccaucaacaaugaguacaa

SEQ ID NO: 9699 - RNA, 19 nt, Artificial Sequence
  Synthetic
cuuuacaaccugaggaaca

SEQ ID NO: 9700 - RNA, 19 nt, Artificial Sequence
  Synthetic
ggccaucaggauugagaaa

SEQ ID NO: 9701 - RNA, 19 nt, Artificial Sequence
  Synthetic
ggagagaugucaugcaagu

SEQ ID NO: 9702 - RNA, 19 nt, Artificial Sequence
  Synthetic
agacaggaauacaggaagu

SEQ ID NO: 9703 - RNA, 19 nt, Artificial Sequence
  Synthetic
gcgagauaucuaugagaca

SEQ ID NO: 9704 - RNA, 19 nt, Artificial Sequence
  Synthetic
gacauaaacaccaggaaca

SEQ ID NO: 9705 - RNA, 19 nt, Artificial Sequence
  Synthetic
agacagaggcuacguguuu

SEQ ID NO: 9706 - RNA, 19 nt, Artificial Sequence
  Synthetic
ggaaagugagacuguggaa

SEQ ID NO: 9707 - RNA, 19 nt, Artificial Sequence
  Synthetic
caguauggcaagaaugcaa

SEQ ID NO: 9708 - RNA, 19 nt, Artificial Sequence
  Synthetic
acaucaacuuaguggccua

SEQ ID NO: 9709 - RNA, 19 nt, Artificial Sequence
  Synthetic
acacagacuugcuuuuaaa

SEQ ID NO: 9710 - RNA, 19 nt, Artificial Sequence
  Synthetic
gcaaugcccucuaucaaua

SEQ ID NO: 9711 - RNA, 19 nt, Artificial Sequence
  Synthetic
ucucuuugguguaaacuaa

SEQ ID NO: 9712 - RNA, 19 nt, Artificial Sequence
  Synthetic
aaagugagacuguggaaca

SEQ ID NO: 9713 - RNA, 19 nt, Artificial Sequence
  Synthetic
gagcagagcacaucagcca

SEQ ID NO: 9714 - RNA, 19 nt, Artificial Sequence
  Synthetic
gggcauuaccucugcagga

SEQ ID NO: 9715 - RNA, 19 nt, Artificial Sequence
  Synthetic
ggagcaaccucggcgcaaa

SEQ ID NO: 9716 - RNA, 19 nt, Artificial Sequence
  Synthetic
ccgcaaugcccucuaucaa

SEQ ID NO: 9717 - RNA, 19 nt, Artificial Sequence
  Synthetic
gcaugaugggccagacaga

SEQ ID NO: 9718 - RNA, 19 nt, Artificial Sequence
  Synthetic
gaaucugaccauuggcuuu

SEQ ID NO: 9719 - RNA, 19 nt, Artificial Sequence
  Synthetic
ccaaggaccgaaagcucua

SEQ ID NO: 9720 - RNA, 19 nt, Artificial Sequence
  Synthetic
uggagaaccucaucagcau

SEQ ID NO: 9721 - RNA, 19 nt, Artificial Sequence
  Synthetic
ggaaaugcgagcagagcac

SEQ ID NO: 9722 - RNA, 19 nt, Artificial Sequence
  Synthetic
ggaacaggaugacacaaca

SEQ ID NO: 9723 - RNA, 19 nt, Artificial Sequence
  Synthetic
ggccuauccuuauguggaa

SEQ ID NO: 9724 - RNA, 19 nt, Artificial Sequence
  Synthetic
accgaaagcucuacaaguu

SEQ ID NO: 9725 - RNA, 19 nt, Artificial Sequence
  Synthetic
gcaaagaguccgaaggugg

SEQ ID NO: 9726 - RNA, 19 nt, Artificial Sequence
  Synthetic
agagcucacaggaggcaaa

SEQ ID NO: 9727 - RNA, 19 nt, Artificial Sequence
  Synthetic
gugaccacaaggaggagaa

SEQ ID NO: 9728 - RNA, 19 nt, Artificial Sequence
  Synthetic
uccagaugcuagauggcaa

SEQ ID NO: 9729 - RNA, 19 nt, Artificial Sequence
  Synthetic
gagccuauccugagcaaac

SEQ ID NO: 9730 - RNA, 19 nt, Artificial Sequence
  Synthetic
ccuuauguggaaagugaga

SEQ ID NO: 9731 - RNA, 19 nt, Artificial Sequence
  Synthetic
gcagugaccacaaggagga

SEQ ID NO: 9732 - RNA, 19 nt, Artificial Sequence
  Synthetic
gcguguuggaccugaagau

SEQ ID NO: 9733 - RNA, 19 nt, Artificial Sequence
  Synthetic
gaauagaaucugaccauug

SEQ ID NO: 9734 - RNA, 19 nt, Artificial Sequence
  Synthetic
cgcaauguguguuugucaa

SEQ ID NO: 9735 - RNA, 19 nt, Artificial Sequence
  Synthetic
gagaaaaugaagagccaua

SEQ ID NO: 9736 - RNA, 19 nt, Artificial Sequence
  Synthetic
gaaugaaggagaaugcaaa

SEQ ID NO: 9737 - RNA, 19 nt, Artificial Sequence
  Synthetic
aggcaguguuggagcgaca

SEQ ID NO: 9738 - RNA, 19 nt, Artificial Sequence
  Synthetic
ccauaaguuagaagaagaa

SEQ ID NO: 9739 - RNA, 19 nt, Artificial Sequence
  Synthetic
gccauaaguuagaagaaga

SEQ ID NO: 9740 - RNA, 19 nt, Artificial Sequence
  Synthetic
caacaguuacagagaauga

SEQ ID NO: 9741 - RNA, 19 nt, Artificial Sequence
  Synthetic
gaauauaaguucccagcuu

SEQ ID NO: 9742 - RNA, 19 nt, Artificial Sequence
  Synthetic
aaucugaagucuuguacua

SEQ ID NO: 9743 - RNA, 19 nt, Artificial Sequence
  Synthetic
gagaagaaggggaauauaa

SEQ ID NO: 9744 - RNA, 19 nt, Artificial Sequence
  Synthetic
aagaagaugaagacaggaa

SEQ ID NO: 9745 - RNA, 19 nt, Artificial Sequence
  Synthetic
gaagaauuugaguggcuaa

SEQ ID NO: 9746 - RNA, 19 nt, Artificial Sequence
  Synthetic
cuccuaagguggacaacaa

SEQ ID NO: 9747 - RNA, 19 nt, Artificial Sequence
  Synthetic
agcaacaguuacagagaau

SEQ ID NO: 9748 - RNA, 19 nt, Artificial Sequence
  Synthetic
uuacagagaaugaaggaga

SEQ ID NO: 9749 - RNA, 19 nt, Artificial Sequence
  Synthetic
caacagacaguaagacgua

SEQ ID NO: 9750 - RNA, 19 nt, Artificial Sequence
  Synthetic
gacaaacaacagacaguaa

SEQ ID NO: 9751 - RNA, 19 nt, Artificial Sequence
  Synthetic
caugaaaugucaccagcaa

SEQ ID NO: 9752 - RNA, 19 nt, Artificial Sequence
  Synthetic
gagccauaaguuagaagaa

SEQ ID NO: 9753 - RNA, 19 nt, Artificial Sequence
  Synthetic
aaugaagagccauaaguua

SEQ ID NO: 9754 - RNA, 19 nt, Artificial Sequence
  Synthetic
gcuuugaagaagaugaaga

SEQ ID NO: 9755 - RNA, 19 nt, Artificial Sequence
  Synthetic
caagaugggcacacgacaa

SEQ ID NO: 9756 - RNA, 19 nt, Artificial Sequence
  Synthetic
ggacauugcacauaauuca

SEQ ID NO: 9757 - RNA, 19 nt, Artificial Sequence
  Synthetic
agaaugaaggagaaugcaa

SEQ ID NO: 9758 - RNA, 19 nt, Artificial Sequence
  Synthetic
cggaaccaguacaaauuua

SEQ ID NO: 9759 - RNA, 19 nt, Artificial Sequence
  Synthetic
gagcacaucugcagucauu

SEQ ID NO: 9760 - RNA, 19 nt, Artificial Sequence
  Synthetic
gaauuugaguggcuaaaga

SEQ ID NO: 9761 - RNA, 19 nt, Artificial Sequence
  Synthetic
gcgcuuugaagaagaugaa

SEQ ID NO: 9762 - RNA, 19 nt, Artificial Sequence
  Synthetic
aagccaagguagccaagua

SEQ ID NO: 9763 - RNA, 19 nt, Artificial Sequence
  Synthetic
cuccagagccugauagaca

SEQ ID NO: 9764 - RNA, 19 nt, Artificial Sequence
  Synthetic
acgacaacauggugaugau

SEQ ID NO: 9765 - RNA, 19 nt, Artificial Sequence
  Synthetic
gaacagacagccaggauaa

SEQ ID NO: 9766 - RNA, 19 nt, Artificial Sequence
  Synthetic
uuacaagacugguggacaa

SEQ ID NO: 9767 - RNA, 19 nt, Artificial Sequence
  Synthetic
ccgaguacccagagaacaa

SEQ ID NO: 9768 - RNA, 19 nt, Artificial Sequence
  Synthetic
caauaaaggccaagaagga

SEQ ID NO: 9769 - RNA, 19 nt, Artificial Sequence
  Synthetic
gagcagagguucuaugaau

SEQ ID NO: 9770 - RNA, 19 nt, Artificial Sequence
  Synthetic
uggaagacaccaacggaaa

SEQ ID NO: 9771 - RNA, 19 nt, Artificial Sequence
  Synthetic
gggcaggaaccaccagaaa

SEQ ID NO: 9772 - RNA, 19 nt, Artificial Sequence
  Synthetic
gggcuauagaucucaaaua

SEQ ID NO: 9773 - RNA, 19 nt, Artificial Sequence
  Synthetic
ggaugaagcagaagagauc

SEQ ID NO: 9774 - RNA, 19 nt, Artificial Sequence
  Synthetic
gcaggaaccaccagaaaga

SEQ ID NO: 9775 - RNA, 19 nt, Artificial Sequence
  Synthetic
agacaaguacuauggaaga

SEQ ID NO: 9776 - RNA, 19 nt, Artificial Sequence
  Synthetic
uuacaaugcccuugaguca

SEQ ID NO: 9777 - RNA, 19 nt, Artificial Sequence
  Synthetic
ccuuagaugucuucauaau

SEQ ID NO: 9778 - RNA, 19 nt, Artificial Sequence
  Synthetic
gcagaaaacuugacuugaa

SEQ ID NO: 9779 - RNA, 19 nt, Artificial Sequence
  Synthetic
aggauauccaagagggaga

SEQ ID NO: 9780 - RNA, 19 nt, Artificial Sequence
  Synthetic
ccaagaaggagaaaguuga

SEQ ID NO: 9781 - RNA, 19 nt, Artificial Sequence
  Synthetic
augcaucggaggagaagaa

SEQ ID NO: 9782 - RNA, 19 nt, Artificial Sequence
  Synthetic
gguucuuguugcuggaaaa

SEQ ID NO: 9783 - RNA, 19 nt, Artificial Sequence
  Synthetic
ccacugacguccugcucua

SEQ ID NO: 9784 - RNA, 19 nt, Artificial Sequence
  Synthetic
gcgcuaugacagcaauaaa

SEQ ID NO: 9785 - RNA, 19 nt, Artificial Sequence
  Synthetic
ggaauaagaacaaacaguu

SEQ ID NO: 9786 - RNA, 19 nt, Artificial Sequence
  Synthetic
acaugagcgugaugaagua

SEQ ID NO: 9787 - RNA, 19 nt, Artificial Sequence
  Synthetic
ggacaaguguaaauaugga

SEQ ID NO: 9788 - RNA, 19 nt, Artificial Sequence
  Synthetic
ugagucaagcacugagaua

SEQ ID NO: 9789 - RNA, 19 nt, Artificial Sequence
  Synthetic
uauccaagagggagaauga

SEQ ID NO: 9790 - RNA, 19 nt, Artificial Sequence
  Synthetic
gggcaauguuuacaagacu

SEQ ID NO: 9791 - RNA, 19 nt, Artificial Sequence
  Synthetic
gacaaguacuauggaagaa

SEQ ID NO: 9792 - RNA, 19 nt, Artificial Sequence
  Synthetic
uggaaaauguagugucaca

SEQ ID NO: 9793 - RNA, 19 nt, Artificial Sequence
  Synthetic
cauacaagggcuacuggaa

SEQ ID NO: 9794 - RNA, 19 nt, Artificial Sequence
  Synthetic
gacacaggaugaagcagaa

SEQ ID NO: 9795 - RNA, 19 nt, Artificial Sequence
  Synthetic
cugaagaggccuugaaaua

SEQ ID NO: 9796 - RNA, 19 nt, Artificial Sequence
  Synthetic
gagcauaaauccucauaaa

SEQ ID NO: 9797 - RNA, 19 nt, Artificial Sequence
  Synthetic
aagaugagguuaagguaaa

SEQ ID NO: 9798 - RNA, 19 nt, Artificial Sequence
  Synthetic
cauaguaacuccaggauau

SEQ ID NO: 9799 - RNA, 19 nt, Artificial Sequence
  Synthetic
ggucaaauguaaucacuua

SEQ ID NO: 9800 - RNA, 19 nt, Artificial Sequence
  Synthetic
ccaaagaucaacagaagaa

SEQ ID NO: 9801 - RNA, 19 nt, Artificial Sequence
  Synthetic
gcgguuuacuauagacaaa

SEQ ID NO: 9802 - RNA, 19 nt, Artificial Sequence
  Synthetic
ggaaguggauuuaaaguuu

SEQ ID NO: 9803 - RNA, 19 nt, Artificial Sequence
  Synthetic
ggguggaaguggauuuaaa

SEQ ID NO: 9804 - RNA, 19 nt, Artificial Sequence
  Synthetic
ggagauaauucaagugacu

SEQ ID NO: 9805 - RNA, 19 nt, Artificial Sequence
  Synthetic
gagcagucauggagagcau

SEQ ID NO: 9806 - RNA, 19 nt, Artificial Sequence
  Synthetic
cggccaugguuuuggaaga

SEQ ID NO: 9807 - RNA, 19 nt, Artificial Sequence
  Synthetic
caagaaacguuuauuggua

SEQ ID NO: 9808 - RNA, 19 nt, Artificial Sequence
  Synthetic
ccucauaaauacugccuau

SEQ ID NO: 9809 - RNA, 19 nt, Artificial Sequence
  Synthetic
gcuauuaaaccauggaaga

SEQ ID NO: 9810 - RNA, 19 nt, Artificial Sequence
  Synthetic
gcaaauaguaucauggcau

SEQ ID NO: 9811 - RNA, 19 nt, Artificial Sequence
  Synthetic
ccagaaauuuggacucuua

SEQ ID NO: 9812 - RNA, 19 nt, Artificial Sequence
  Synthetic
gaagaacucugguggauuu

SEQ ID NO: 9813 - RNA, 19 nt, Artificial Sequence
  Synthetic
augagaaagcugagaauca

SEQ ID NO: 9814 - RNA, 19 nt, Artificial Sequence
  Synthetic
guacuguucucgugggaau

SEQ ID NO: 9815 - RNA, 19 nt, Artificial Sequence
  Synthetic
gcugauggccagauauuua

SEQ ID NO: 9816 - RNA, 19 nt, Artificial Sequence
  Synthetic
ggauuuaaaguuugccuua

SEQ ID NO: 9817 - RNA, 19 nt, Artificial Sequence
  Synthetic
agaaggaucccaaagaaua

SEQ ID NO: 9818 - RNA, 19 nt, Artificial Sequence
  Synthetic
cagaauugaaagaagaaga

SEQ ID NO: 9819 - RNA, 19 nt, Artificial Sequence
  Synthetic
caugauuggagaagaggaa

SEQ ID NO: 9820 - RNA, 19 nt, Artificial Sequence
  Synthetic
gggaagaagcuuugaggcu

SEQ ID NO: 9821 - RNA, 19 nt, Artificial Sequence
  Synthetic
ugaacaaggaagggaauua

SEQ ID NO: 9822 - RNA, 19 nt, Artificial Sequence
  Synthetic
gaucauaacccuaaggugu

SEQ ID NO: 9823 - RNA, 19 nt, Artificial Sequence
  Synthetic
gggaauuacagaaggccuu

SEQ ID NO: 9824 - RNA, 19 nt, Artificial Sequence
  Synthetic
gcaugagaaagcugagaau

SEQ ID NO: 9825 - RNA, 19 nt, Artificial Sequence
  Synthetic
gugaagaacugguggcuga

SEQ ID NO: 9826 - RNA, 19 nt, Artificial Sequence
  Synthetic
gcuuaaugaaugaggauga

SEQ ID NO: 9827 - RNA, 19 nt, Artificial Sequence
  Synthetic
ggacauuguuguuagcgaa

SEQ ID NO: 9828 - RNA, 19 nt, Artificial Sequence
  Synthetic
cugcagagcuugaaggcca

SEQ ID NO: 9829 - RNA, 19 nt, Artificial Sequence
  Synthetic
guacaggagacuaagggaa

SEQ ID NO: 9830 - RNA, 19 nt, Artificial Sequence
  Synthetic
gcuucaaggcccuggauga

SEQ ID NO: 9831 - RNA, 19 nt, Artificial Sequence
  Synthetic
gaaagagcgccuugggaca

SEQ ID NO: 9832 - RNA, 19 nt, Artificial Sequence
  Synthetic
gcaaguuaaaugagggcca

SEQ ID NO: 9833 - RNA, 19 nt, Artificial Sequence
  Synthetic
gggaaauggagcaggcugu

SEQ ID NO: 9834 - RNA, 19 nt, Artificial Sequence
  Synthetic
gcgaagacuugaauggaac

SEQ ID NO: 9835 - RNA, 19 nt, Artificial Sequence
  Synthetic
gggccugggaaaugaaaga

SEQ ID NO: 9836 - RNA, 19 nt, Artificial Sequence
  Synthetic
augaagaauuccauggcuu

SEQ ID NO: 9837 - RNA, 19 nt, Artificial Sequence
  Synthetic
guuacagacggaagaagaa

SEQ ID NO: 9838 - RNA, 19 nt, Artificial Sequence
  Synthetic
gggaaaugaaagagcgccu

SEQ ID NO: 9839 - RNA, 19 nt, Artificial Sequence
  Synthetic
gagcuuaaugaaugaggau

SEQ ID NO: 9840 - RNA, 19 nt, Artificial Sequence
  Synthetic
cggaagaagaagagcacag

SEQ ID NO: 9841 - RNA, 19 nt, Artificial Sequence
  Synthetic
ugggaucacaucagauaaa

SEQ ID NO: 9842 - RNA, 19 nt, Artificial Sequence
  Synthetic
uggcugagcgacuggagaa

SEQ ID NO: 9843 - RNA, 19 nt, Artificial Sequence
  Synthetic
ugacauugccucugcgcuu

SEQ ID NO: 9844 - RNA, 19 nt, Artificial Sequence
  Synthetic
uggacgaccuagaggagca

SEQ ID NO: 9845 - RNA, 19 nt, Artificial Sequence
  Synthetic
uuucagacggcaaguuaaa

SEQ ID NO: 9846 - RNA, 19 nt, Artificial Sequence
  Synthetic
agccaagaagagugaagaa

SEQ ID NO: 9847 - RNA, 19 nt, Artificial Sequence
  Synthetic
agaagagugagguggacau

SEQ ID NO: 9848 - RNA, 19 nt, Artificial Sequence
  Synthetic
acacauuggacauggaucu

SEQ ID NO: 9849 - RNA, 19 nt, Artificial Sequence
  Synthetic
aggaaacaggugagcagau

SEQ ID NO: 9850 - RNA, 19 nt, Artificial Sequence
  Synthetic
augccaaggagcuggauca

SEQ ID NO: 9851 - RNA, 19 nt, Artificial Sequence
  Synthetic
cgcuggaacuguugcccaa

SEQ ID NO: 9852 - RNA, 19 nt, Artificial Sequence
  Synthetic
cuuagauaccuucaugaaa

SEQ ID NO: 9853 - RNA, 19 nt, Artificial Sequence
  Synthetic
ucgagaagaaagugcgagu

SEQ ID NO: 9854 - RNA, 19 nt, Artificial Sequence
  Synthetic
uggugagcuuaaugaauga

SEQ ID NO: 9855 - RNA, 19 nt, Artificial Sequence
  Synthetic
ccacagacagaaagcauaa

SEQ ID NO: 9856 - RNA, 19 nt, Artificial Sequence
  Synthetic
caucugaccuccuggacaa

SEQ ID NO: 9857 - RNA, 19 nt, Artificial Sequence
  Synthetic
agacagaaagcauaacaua

SEQ ID NO: 9858 - RNA, 19 nt, Artificial Sequence
  Synthetic
ggaugaggguggugcacga

SEQ ID NO: 9859 - RNA, 19 nt, Artificial Sequence
  Synthetic
ggaacaaggagaucaugua

SEQ ID NO: 9860 - RNA, 19 nt, Artificial Sequence
  Synthetic
ucagcaagcuccuggaaga

SEQ ID NO: 9861 - RNA, 19 nt, Artificial Sequence
  Synthetic
uucaagaagucuaggauga

SEQ ID NO: 9862 - RNA, 19 nt, Artificial Sequence
  Synthetic
gaggcauccugaagcauua

SEQ ID NO: 9863 - RNA, 19 nt, Artificial Sequence
  Synthetic
aguuugagguccugcggaa

SEQ ID NO: 9864 - RNA, 19 nt, Artificial Sequence
  Synthetic
aggagugcgugcagaagua

SEQ ID NO: 9865 - RNA, 19 nt, Artificial Sequence
  Synthetic
ggaaagaguguggcagcaa

SEQ ID NO: 9866 - RNA, 19 nt, Artificial Sequence
  Synthetic
gcuacaacgaggagcagau

SEQ ID NO: 9867 - RNA, 19 nt, Artificial Sequence
  Synthetic
gcuggagagcccugagaau

SEQ ID NO: 9868 - RNA, 19 nt, Artificial Sequence
  Synthetic
acacacggcaagaggauga

SEQ ID NO: 9869 - RNA, 19 nt, Artificial Sequence
  Synthetic
ggcagaagguacuggugau

SEQ ID NO: 9870 - RNA, 19 nt, Artificial Sequence
  Synthetic
gcucagggcaggagaugca

SEQ ID NO: 9871 - RNA, 19 nt, Artificial Sequence
  Synthetic
acagaaagcauaacauaca

SEQ ID NO: 9872 - RNA, 19 nt, Artificial Sequence
  Synthetic
ggagaacggcauugugcau

SEQ ID NO: 9873 - RNA, 19 nt, Artificial Sequence
  Synthetic
ccacaacacgauagccauu

SEQ ID NO: 9874 - RNA, 19 nt, Artificial Sequence
  Synthetic
ucuaugggacugaggagua

SEQ ID NO: 9875 - RNA, 19 nt, Artificial Sequence
  Synthetic
uuucagucauuuagccaaa

SEQ ID NO: 9876 - RNA, 19 nt, Artificial Sequence
  Synthetic
gcaacaagaaauccggaga

SEQ ID NO: 9877 - RNA, 19 nt, Artificial Sequence
  Synthetic
aggaggagugcgugcagaa

SEQ ID NO: 9878 - RNA, 19 nt, Artificial Sequence
  Synthetic
ccaacauccuggaggugga

SEQ ID NO: 9879 - RNA, 19 nt, Artificial Sequence
  Synthetic
ucuacaaacaguucaagaa

SEQ ID NO: 9880 - RNA, 19 nt, Artificial Sequence
  Synthetic
agaagguacuggugaugga

SEQ ID NO: 9881 - RNA, 19 nt, Artificial Sequence
  Synthetic
agaaguucgucucggucua

SEQ ID NO: 9882 - RNA, 19 nt, Artificial Sequence
  Synthetic
acaacgaggagcagauuca

SEQ ID NO: 9883 - RNA, 19 nt, Artificial Sequence
  Synthetic
uggaugaugaugagaaguu

SEQ ID NO: 9884 - RNA, 19 nt, Artificial Sequence
  Synthetic
caagaaauccggagagcug

SEQ ID NO: 9885 - RNA, 19 nt, Artificial Sequence
  Synthetic
ugaauaugcugaugagaca

SEQ ID NO: 9886 - RNA, 19 nt, Artificial Sequence
  Synthetic
gaacuaaagggaucugaaa

SEQ ID NO: 9887 - RNA, 19 nt, Artificial Sequence
  Synthetic
cagcaauaucaacguaaua

SEQ ID NO: 9888 - RNA, 19 nt, Artificial Sequence
  Synthetic
ggaggaagugcuaaauuua

SEQ ID NO: 9889 - RNA, 19 nt, Artificial Sequence
  Synthetic
acuaaagggaucugaaaca

SEQ ID NO: 9890 - RNA, 19 nt, Artificial Sequence
  Synthetic
ccaaagagucaucagaaga

SEQ ID NO: 9891 - RNA, 19 nt, Artificial Sequence
  Synthetic
ccacagaacugaaacaucu

SEQ ID NO: 9892 - RNA, 19 nt, Artificial Sequence
  Synthetic
cagcaaccauuguagaauu

SEQ ID NO: 9893 - RNA, 19 nt, Artificial Sequence
  Synthetic
uggaggaagugcuaaauuu

SEQ ID NO: 9894 - RNA, 19 nt, Artificial Sequence
  Synthetic
cagaugauuuugaauggaa

SEQ ID NO: 9895 - RNA, 19 nt, Artificial Sequence
  Synthetic
agcuacaacuggagcauuu

SEQ ID NO: 9896 - RNA, 19 nt, Artificial Sequence
  Synthetic
ugucaaagcaucaucucaa

SEQ ID NO: 9897 - RNA, 19 nt, Artificial Sequence
  Synthetic
ucaccuaagugugggcuaa

SEQ ID NO: 9898 - RNA, 19 nt, Artificial Sequence
  Synthetic
cuaaagggaucugaaacaa

SEQ ID NO: 9899 - RNA, 19 nt, Artificial Sequence
  Synthetic
ggaacuaaagggaucugaa

SEQ ID NO: 9900 - RNA, 19 nt, Artificial Sequence
  Synthetic
ccagggacuuaaucagcaa

SEQ ID NO: 9901 - RNA, 19 nt, Artificial Sequence
  Synthetic
caacguaauaguucuggaa

SEQ ID NO: 9902 - RNA, 19 nt, Artificial Sequence
  Synthetic
caaagagggauuucaccua

SEQ ID NO: 9903 - RNA, 19 nt, Artificial Sequence
  Synthetic
gaacagauggauuaccuuu

SEQ ID NO: 9904 - RNA, 19 nt, Artificial Sequence
  Synthetic
ccaagaaggccacagaacu

SEQ ID NO: 9905 - RNA, 19 nt, Artificial Sequence
  Synthetic
ucuagaagaagaacucaaa

SEQ ID NO: 9906 - RNA, 19 nt, Artificial Sequence
  Synthetic
cucuggaggaagugcuaaa

SEQ ID NO: 9907 - RNA, 19 nt, Artificial Sequence
  Synthetic
gucuagaagaagaacucaa

SEQ ID NO: 9908 - RNA, 19 nt, Artificial Sequence
  Synthetic
gcauuuacugcuggauuua

SEQ ID NO: 9909 - RNA, 19 nt, Artificial Sequence
  Synthetic
ccaggaugcucacauuuaa

SEQ ID NO: 9910 - RNA, 19 nt, Artificial Sequence
  Synthetic
agagucaucagaagaggaa

SEQ ID NO: 9911 - RNA, 19 nt, Artificial Sequence
  Synthetic
guucaagaguucccuauca

SEQ ID NO: 9912 - RNA, 19 nt, Artificial Sequence
  Synthetic
uugaauguaugguuugcua

SEQ ID NO: 9913 - RNA, 19 nt, Artificial Sequence
  Synthetic
agcaaccauuguagaauuu

SEQ ID NO: 9914 - RNA, 19 nt, Artificial Sequence
  Synthetic
caagaaggccacagaacug

SEQ ID NO: 9915 - RNA, 19 nt, Artificial Sequence
  Synthetic
cagaggaccugguggcaaa

SEQ ID NO: 9916 - RNA, 19 nt, Artificial Sequence
  Synthetic
gagagaugccuguggacaa

SEQ ID NO: 9917 - RNA, 19 nt, Artificial Sequence
  Synthetic
cucaauagccguaguguaa

SEQ ID NO: 9918 - RNA, 19 nt, Artificial Sequence
  Synthetic
gaacaaacacucuggcauu

SEQ ID NO: 9919 - RNA, 19 nt, Artificial Sequence
  Synthetic
guucgagacuggaguacaa

SEQ ID NO: 9920 - RNA, 19 nt, Artificial Sequence
  Synthetic
uugagaagaugcaggacaa

SEQ ID NO: 9921 - RNA, 19 nt, Artificial Sequence
  Synthetic
ugacgaagcucaacgagaa

SEQ ID NO: 9922 - RNA, 19 nt, Artificial Sequence
  Synthetic
gaagaagccugaagacaca

SEQ ID NO: 9923 - RNA, 19 nt, Artificial Sequence
  Synthetic
ggacaugacugcccgaauu

SEQ ID NO: 9924 - RNA, 19 nt, Artificial Sequence
  Synthetic
gggcagagaagaugggcca

SEQ ID NO: 9925 - RNA, 19 nt, Artificial Sequence
  Synthetic
agacaucaaugcagugaau

SEQ ID NO: 9926 - RNA, 19 nt, Artificial Sequence
  Synthetic
ccgaagcucugcagaagaa

SEQ ID NO: 9927 - RNA, 19 nt, Artificial Sequence
  Synthetic
gaaauggaacccugaacaa

SEQ ID NO: 9928 - RNA, 19 nt, Artificial Sequence
  Synthetic
aguacaaggcagacaucaa

SEQ ID NO: 9929 - RNA, 19 nt, Artificial Sequence
  Synthetic
gcccgagucccgaggauaa

SEQ ID NO: 9930 - RNA, 19 nt, Artificial Sequence
  Synthetic
agaagaugcaggacaagua

SEQ ID NO: 9931 - RNA, 19 nt, Artificial Sequence
  Synthetic
cagcagacauguggaguuu

SEQ ID NO: 9932 - RNA, 19 nt, Artificial Sequence
  Synthetic
ggauaaagcuugggguuca

SEQ ID NO: 9933 - RNA, 19 nt, Artificial Sequence
  Synthetic
agucauggacaccgugaua

SEQ ID NO: 9934 - RNA, 19 nt, Artificial Sequence
  Synthetic
uaacaaguauggagagaug

SEQ ID NO: 9935 - RNA, 19 nt, Artificial Sequence
  Synthetic
uguguaagcucaugaagau

SEQ ID NO: 9936 - RNA, 19 nt, Artificial Sequence
  Synthetic
acaucaaugcagugaauga

SEQ ID NO: 9937 - RNA, 19 nt, Artificial Sequence
  Synthetic
ccaauuucgucguggacca

SEQ ID NO: 9938 - RNA, 19 nt, Artificial Sequence
  Synthetic
guguaaugauugaugagga

SEQ ID NO: 9939 - RNA, 19 nt, Artificial Sequence
  Synthetic
acucaauagccguagugua

SEQ ID NO: 9940 - RNA, 19 nt, Artificial Sequence
  Synthetic
gggcacggaucaauguaau

SEQ ID NO: 9941 - RNA, 19 nt, Artificial Sequence
  Synthetic
uacagaagcuauugcagua

SEQ ID NO: 9942 - RNA, 19 nt, Artificial Sequence
  Synthetic
uguaacaaguauggagaga

SEQ ID NO: 9943 - RNA, 19 nt, Artificial Sequence
  Synthetic
cugcugugguugagauguu

SEQ ID NO: 9944 - RNA, 19 nt, Artificial Sequence
  Synthetic
guguguaagcucaugaaga

SEQ ID NO: 9945 - RNA, 19 nt, Artificial Sequence
  Synthetic
gguaaagacugaagggaaa

SEQ ID NO: 9946 - RNA, 19 nt, Artificial Sequence
  Synthetic
ggaaaggagcaaagagaaa

SEQ ID NO: 9947 - RNA, 19 nt, Artificial Sequence
  Synthetic
gugaagagcuuguggaaaa

SEQ ID NO: 9948 - RNA, 19 nt, Artificial Sequence
  Synthetic
uguaaucaguguagagaaa

SEQ ID NO: 9949 - RNA, 19 nt, Artificial Sequence
  Synthetic
cagaagaagccgugaacuu

SEQ ID NO: 9950 - RNA, 19 nt, Artificial Sequence
  Synthetic
cgggaaagaagcucagaaa

SEQ ID NO: 9951 - RNA, 19 nt, Artificial Sequence
  Synthetic
ugguaaagacugaagggaa

SEQ ID NO: 9952 - RNA, 19 nt, Artificial Sequence
  Synthetic
ugauggacauggaggaauu

SEQ ID NO: 9953 - RNA, 19 nt, Artificial Sequence
  Synthetic
gggaaaggagcaaagagaa

SEQ ID NO: 9954 - RNA, 19 nt, Artificial Sequence
  Synthetic
guuauaaugaggagaguca

SEQ ID NO: 9955 - RNA, 19 nt, Artificial Sequence
  Synthetic
acagaaggcuggaggaaac

SEQ ID NO: 9956 - RNA, 19 nt, Artificial Sequence
  Synthetic
gcaacaggcuggccaacaa

SEQ ID NO: 9957 - RNA, 19 nt, Artificial Sequence
  Synthetic
gcuauguggcugagcggaa

SEQ ID NO: 9958 - RNA, 19 nt, Artificial Sequence
  Synthetic
agggaaaggagcaaagaga

SEQ ID NO: 9959 - RNA, 19 nt, Artificial Sequence
  Synthetic
uauaaugaggagagucaaa

SEQ ID NO: 9960 - RNA, 19 nt, Artificial Sequence
  Synthetic
ggaaagaagcucagaaagg

SEQ ID NO: 9961 - RNA, 19 nt, Artificial Sequence
  Synthetic
ucaauaucccagaugguaa

SEQ ID NO: 9962 - RNA, 19 nt, Artificial Sequence
  Synthetic
caauaucccagaugguaaa

SEQ ID NO: 9963 - RNA, 19 nt, Artificial Sequence
  Synthetic
gcauaauccaacucaguau

SEQ ID NO: 9964 - RNA, 19 nt, Artificial Sequence
  Synthetic
augaagaguuccuuaaaca

SEQ ID NO: 9965 - RNA, 19 nt, Artificial Sequence
  Synthetic
cagugaagagcuuguggaa

SEQ ID NO: 9966 - RNA, 19 nt, Artificial Sequence
  Synthetic
ucccaugguuguaaauaaa

SEQ ID NO: 9967 - RNA, 19 nt, Artificial Sequence
  Synthetic
agagaagaauggcagugaa

SEQ ID NO: 9968 - RNA, 19 nt, Artificial Sequence
  Synthetic
gaauggcagugaagagcuu

SEQ ID NO: 9969 - RNA, 19 nt, Artificial Sequence
  Synthetic
aaacaagcuuccagccaga

SEQ ID NO: 9970 - RNA, 19 nt, Artificial Sequence
  Synthetic
augaagagcggaugaggau

SEQ ID NO: 9971 - RNA, 19 nt, Artificial Sequence
  Synthetic
cucccaugguuguaaauaa

SEQ ID NO: 9972 - RNA, 19 nt, Artificial Sequence
  Synthetic
gguuguaaauaaagguuuc

SEQ ID NO: 9973 - RNA, 19 nt, Artificial Sequence
  Synthetic
ggaggaaacgucagggaug

SEQ ID NO: 9974 - RNA, 19 nt, Artificial Sequence
  Synthetic
cugugaugguggugcggau

SEQ ID NO: 9975 - RNA, 19 nt, Artificial Sequence
  Synthetic
acacaauagaugagggaua

SEQ ID NO: 9976 - RNA, 19 nt, Artificial Sequence
  Synthetic
gggauauguuuaugggcua

SEQ ID NO: 9977 - RNA, 19 nt, Artificial Sequence
  Synthetic
ggauguaaagauagggcaa

SEQ ID NO: 9978 - RNA, 19 nt, Artificial Sequence
  Synthetic
cauaauggguacugcuuaa

SEQ ID NO: 9979 - RNA, 19 nt, Artificial Sequence
  Synthetic
ggaaggacaaaguggguau

SEQ ID NO: 9980 - RNA, 19 nt, Artificial Sequence
  Synthetic
ccaagagauugcugaagua

SEQ ID NO: 9981 - RNA, 19 nt, Artificial Sequence
  Synthetic
cggaagaagcuuaacaaaa

SEQ ID NO: 9982 - RNA, 19 nt, Artificial Sequence
  Synthetic
caagagagcuggaauucua

SEQ ID NO: 9983 - RNA, 19 nt, Artificial Sequence
  Synthetic
guguuaaguuccacagcua

SEQ ID NO: 9984 - RNA, 19 nt, Artificial Sequence
  Synthetic
aguagaagugcgaaugaua

SEQ ID NO: 9985 - RNA, 19 nt, Artificial Sequence
  Synthetic
cugaaguagaagugcgaau

SEQ ID NO: 9986 - RNA, 19 nt, Artificial Sequence
  Synthetic
agacagaaaaccagcauua

SEQ ID NO: 9987 - RNA, 19 nt, Artificial Sequence
  Synthetic
gugcuuggcaugaggguuu

SEQ ID NO: 9988 - RNA, 19 nt, Artificial Sequence
  Synthetic
ccuguauaauggauguaaa

SEQ ID NO: 9989 - RNA, 19 nt, Artificial Sequence
  Synthetic
caaaguggguauacugcaa

SEQ ID NO: 9990 - RNA, 19 nt, Artificial Sequence
  Synthetic
gcccaagagagcuggaauu

SEQ ID NO: 9991 - RNA, 19 nt, Artificial Sequence
  Synthetic
ggauauguuuaugggcuaa

SEQ ID NO: 9992 - RNA, 19 nt, Artificial Sequence
  Synthetic
gagcuggaauucuauaaua

SEQ ID NO: 9993 - RNA, 19 nt, Artificial Sequence
  Synthetic
uggaagaugugacccauaa

SEQ ID NO: 9994 - RNA, 19 nt, Artificial Sequence
  Synthetic
uugaaaaucuggagcaaga

SEQ ID NO: 9995 - RNA, 19 nt, Artificial Sequence
  Synthetic
gcauuacggaagaagcuua

SEQ ID NO: 9996 - RNA, 19 nt, Artificial Sequence
  Synthetic
ugguguucuucuagagcua

SEQ ID NO: 9997 - RNA, 19 nt, Artificial Sequence
  Synthetic
acauguacgggaaggacaa

SEQ ID NO: 9998 - RNA, 19 nt, Artificial Sequence
  Synthetic
ccaaacgauuuauaccuaa

SEQ ID NO: 9999 - RNA, 19 nt, Artificial Sequence
  Synthetic
gcaagacaauggguggaaa

SEQ ID NO: 10000 - RNA, 19 nt, Artificial Sequence
  Synthetic
caagacaauggguggaaaa

SEQ ID NO: 10001 - RNA, 19 nt, Artificial Sequence
  Synthetic
auguaaagauagggcaaaa

SEQ ID NO: 10002 - RNA, 19 nt, Artificial Sequence
  Synthetic
ggccagaggcugagaauaa

SEQ ID NO: 10003 - RNA, 19 nt, Artificial Sequence
  Synthetic
ggaagacguuugaggauua

SEQ ID NO: 10004 - RNA, 19 nt, Artificial Sequence
  Synthetic
uugagaagguggugaacaa

SEQ ID NO: 10005 - RNA, 19 nt, Artificial Sequence
  Synthetic
ugucauggauggaggguau

SEQ ID NO: 10006 - RNA, 19 nt, Artificial Sequence
  Synthetic
gaggagagaccuuggaaau

SEQ ID NO: 10007 - RNA, 19 nt, Artificial Sequence
  Synthetic
acggagaccugaagagcua

SEQ ID NO: 10008 - RNA, 19 nt, Artificial Sequence
  Synthetic
gaacaaggcucccgagagu

SEQ ID NO: 10009 - RNA, 19 nt, Artificial Sequence
  Synthetic
agauggaguuugaggacau

SEQ ID NO: 10010 - RNA, 19 nt, Artificial Sequence
  Synthetic
gcaugguguaugagggcaa

SEQ ID NO: 10011 - RNA, 19 nt, Artificial Sequence
  Synthetic
ugucaaaauuggagacuuu

SEQ ID NO: 10012 - RNA, 19 nt, Artificial Sequence
  Synthetic
gaacgauguuggacucaua

SEQ ID NO: 10013 - RNA, 19 nt, Artificial Sequence
  Synthetic
uggauuccguggaggauaa

SEQ ID NO: 10014 - RNA, 19 nt, Artificial Sequence
  Synthetic
gggacaucaucaaggguga

SEQ ID NO: 10015 - RNA, 19 nt, Artificial Sequence
  Synthetic
ccgcgaagggcaagaccaa

SEQ ID NO: 10016 - RNA, 19 nt, Artificial Sequence
  Synthetic
ggaacaaaauuucgaaaga

SEQ ID NO: 10017 - RNA, 19 nt, Artificial Sequence
  Synthetic
gugaggagcuggagaugga

SEQ ID NO: 10018 - RNA, 19 nt, Artificial Sequence
  Synthetic
ggaacuacagcgugcgaau

SEQ ID NO: 10019 - RNA, 19 nt, Artificial Sequence
  Synthetic
ggaccaugccugaagccaa

SEQ ID NO: 10020 - RNA, 19 nt, Artificial Sequence
  Synthetic
ccacaagauggaagaaguu

SEQ ID NO: 10021 - RNA, 19 nt, Artificial Sequence
  Synthetic
gcacaaccagagugaguau

SEQ ID NO: 10022 - RNA, 19 nt, Artificial Sequence
  Synthetic
gcacaggccuuuugagaag

SEQ ID NO: 10023 - RNA, 19 nt, Artificial Sequence
  Synthetic
gcaugaaaucuuugagaac

SEQ ID NO: 10024 - RNA, 19 nt, Artificial Sequence
  Synthetic
gggaccuggcagcgagaaa

SEQ ID NO: 10025 - RNA, 19 nt, Artificial Sequence
  Synthetic
gacaaggcauccugugaaa

SEQ ID NO: 10026 - RNA, 19 nt, Artificial Sequence
  Synthetic
cccagcagauggaaagaaa

SEQ ID NO: 10027 - RNA, 19 nt, Artificial Sequence
  Synthetic
ggacggugguagacauuga

SEQ ID NO: 10028 - RNA, 19 nt, Artificial Sequence
  Synthetic
ccuucuaugccuuggacaa

SEQ ID NO: 10029 - RNA, 19 nt, Artificial Sequence
  Synthetic
aguuugaggacauggagaa

SEQ ID NO: 10030 - RNA, 19 nt, Artificial Sequence
  Synthetic
ggaagaaguuucaggaacc

SEQ ID NO: 10031 - RNA, 19 nt, Artificial Sequence
  Synthetic
cggccucauugaagaaauu

SEQ ID NO: 10032 - RNA, 19 nt, Artificial Sequence
  Synthetic
ccaaauggcuggugagauu

SEQ ID NO: 10033 - RNA, 19 nt, Artificial Sequence
  Synthetic
agaacaaggcugagaucaa

SEQ ID NO: 10034 - RNA, 19 nt, Artificial Sequence
  Synthetic
cguaauagcagcagcauau

SEQ ID NO: 10035 - RNA, 19 nt, Artificial Sequence
  Synthetic
gcuacaaccuggagccaca

SEQ ID NO: 10036 - RNA, 19 nt, Artificial Sequence
  Synthetic
cagagaggcugaugguauu

SEQ ID NO: 10037 - RNA, 19 nt, Artificial Sequence
  Synthetic
acagagaggcugaugguau

SEQ ID NO: 10038 - RNA, 19 nt, Artificial Sequence
  Synthetic
ccguaauagcagcagcaua

SEQ ID NO: 10039 - RNA, 19 nt, Artificial Sequence
  Synthetic
gggcugugcguguggagaa

SEQ ID NO: 10040 - RNA, 19 nt, Artificial Sequence
  Synthetic
gggagcagaucucgauaau

SEQ ID NO: 10041 - RNA, 19 nt, Artificial Sequence
  Synthetic
cggcaagaagagaaacaga

SEQ ID NO: 10042 - RNA, 19 nt, Artificial Sequence
  Synthetic
ucgagauccaggaggacaa

SEQ ID NO: 10043 - RNA, 19 nt, Artificial Sequence
  Synthetic
ggcaagaagagaaacagaa

SEQ ID NO: 10044 - RNA, 19 nt, Artificial Sequence
  Synthetic
ccuaaagagugcaagguag

SEQ ID NO: 10045 - RNA, 19 nt, Artificial Sequence
  Synthetic
agacagacuauuaccgcaa

SEQ ID NO: 10046 - RNA, 19 nt, Artificial Sequence
  Synthetic
ccuguaugcuucugugaau

SEQ ID NO: 10047 - RNA, 19 nt, Artificial Sequence
  Synthetic
uguaugagacagacuauua

SEQ ID NO: 10048 - RNA, 19 nt, Artificial Sequence
  Synthetic
ucaccauucccgugggcaa

SEQ ID NO: 10049 - RNA, 19 nt, Artificial Sequence
  Synthetic
ccaacgugacggaggcaga

SEQ ID NO: 10050 - RNA, 19 nt, Artificial Sequence
  Synthetic
gggacguguaugagacaga

SEQ ID NO: 10051 - RNA, 19 nt, Artificial Sequence
  Synthetic
cccugaagacggugaauga

SEQ ID NO: 10052 - RNA, 19 nt, Artificial Sequence
  Synthetic
ucaagaaccucaaacuaau

SEQ ID NO: 10053 - RNA, 19 nt, Artificial Sequence
  Synthetic
gcacgcauguggagggaag

SEQ ID NO: 10054 - RNA, 19 nt, Artificial Sequence
  Synthetic
cggaauaccggaucgacau

SEQ ID NO: 10055 - RNA, 19 nt, Artificial Sequence
  Synthetic
ucuacggcaagaagagaaa

SEQ ID NO: 10056 - RNA, 19 nt, Artificial Sequence
  Synthetic
uggcaauggcucuuggaca

SEQ ID NO: 10057 - RNA, 19 nt, Artificial Sequence
  Synthetic
aggccucguuccagaagaa

SEQ ID NO: 10058 - RNA, 19 nt, Artificial Sequence
  Synthetic
cagcaagaacaguguccuu

SEQ ID NO: 10059 - RNA, 19 nt, Artificial Sequence
  Synthetic
gcuggaaccugcuggaugu

SEQ ID NO: 10060 - RNA, 19 nt, Artificial Sequence
  Synthetic
guuugugcaccgagaucua

SEQ ID NO: 10061 - RNA, 19 nt, Artificial Sequence
  Synthetic
cccuaaagagugcaaggua

SEQ ID NO: 10062 - RNA, 19 nt, Artificial Sequence
  Synthetic
agagauugcugaaguagaa

SEQ ID NO: 10063 - RNA, 19 nt, Artificial Sequence
  Synthetic
ugacagaacuuuggcagaa

SEQ ID NO: 10064 - RNA, 19 nt, Artificial Sequence
  Synthetic
cacaauagaugagggauau

SEQ ID NO: 10065 - RNA, 19 nt, Artificial Sequence
  Synthetic
cgaagaaagugaugaauuu

SEQ ID NO: 10066 - RNA, 19 nt, Artificial Sequence
  Synthetic
ugaaagaccugguggaaga

SEQ ID NO: 10067 - RNA, 19 nt, Artificial Sequence
  Synthetic
gugaagaggcugaaggaga

SEQ ID NO: 10068 - RNA, 19 nt, Artificial Sequence
  Synthetic
ugaagaggcugaaggagaa

SEQ ID NO: 10069 - RNA, 19 nt, Artificial Sequence
  Synthetic
ggaccaaguaucugaaaga

SEQ ID NO: 10070 - RNA, 19 nt, Artificial Sequence
  Synthetic
ccgaagaaagugaugaauu

SEQ ID NO: 10071 - RNA, 19 nt, Artificial Sequence
  Synthetic
agguuguccuugaguaaua

SEQ ID NO: 10072 - RNA, 19 nt, Artificial Sequence
  Synthetic
ccagguuguccuugaguaa

SEQ ID NO: 10073 - RNA, 19 nt, Artificial Sequence
  Synthetic
ugguagugcuagagaccuu

SEQ ID NO: 10074 - RNA, 19 nt, Artificial Sequence
  Synthetic
acccaaacauuguggacuu

SEQ ID NO: 10075 - RNA, 19 nt, Artificial Sequence
  Synthetic
gcagaaaaguugggagcau

SEQ ID NO: 10076 - RNA, 19 nt, Artificial Sequence
  Synthetic
ccaugcagaucuacaagaa

SEQ ID NO: 10077 - RNA, 19 nt, Artificial Sequence
  Synthetic
gcccgaagaaagugaugaa

SEQ ID NO: 10078 - RNA, 19 nt, Artificial Sequence
  Synthetic
gaguacaucaagacgggaa

SEQ ID NO: 10079 - RNA, 19 nt, Artificial Sequence
  Synthetic
ggucgaggcugcagugagu

SEQ ID NO: 10080 - RNA, 19 nt, Artificial Sequence
  Synthetic
ccaacguccuucuggauga

SEQ ID NO: 10081 - RNA, 19 nt, Artificial Sequence
  Synthetic
gacagaagaugguccagaa

SEQ ID NO: 10082 - RNA, 19 nt, Artificial Sequence
  Synthetic
ugaaguaggaggaucauuu

SEQ ID NO: 10083 - RNA, 19 nt, Artificial Sequence
  Synthetic
cgucagagccaccgcagau

SEQ ID NO: 10084 - RNA, 19 nt, Artificial Sequence
  Synthetic
ccuaccugcccgaggagua

SEQ ID NO: 10085 - RNA, 19 nt, Artificial Sequence
  Synthetic
ugguggaagaggaggcuga

SEQ ID NO: 10086 - RNA, 19 nt, Artificial Sequence
  Synthetic
cuauuagccuggcguggua

SEQ ID NO: 10087 - RNA, 19 nt, Artificial Sequence
  Synthetic
cugagauccuccagaaagu

SEQ ID NO: 10088 - RNA, 19 nt, Artificial Sequence
  Synthetic
agaagaugguccagaagcu

SEQ ID NO: 10089 - RNA, 19 nt, Artificial Sequence
  Synthetic
gaugagaggcugacaccca

SEQ ID NO: 10090 - RNA, 19 nt, Artificial Sequence
  Synthetic
uggccgaccucgugcacau

SEQ ID NO: 10091 - RNA, 19 nt, Artificial Sequence
  Synthetic
acgagaggcuagagaagcu

SEQ ID NO: 10092 - RNA, 19 nt, Artificial Sequence
  Synthetic
caagucagguuucauguaa

SEQ ID NO: 10093 - RNA, 19 nt, Artificial Sequence
  Synthetic
cuaguuacccagacaguga

SEQ ID NO: 10094 - RNA, 19 nt, Artificial Sequence
  Synthetic
agaccuaguuacccagaca

SEQ ID NO: 10095 - RNA, 19 nt, Artificial Sequence
  Synthetic
uaagaaaggcugaggauga

SEQ ID NO: 10096 - RNA, 19 nt, Artificial Sequence
  Synthetic
uggagaacgugauggcaaa

SEQ ID NO: 10097 - RNA, 19 nt, Artificial Sequence
  Synthetic
ugacaaagcgaguggacau

SEQ ID NO: 10098 - RNA, 19 nt, Artificial Sequence
  Synthetic
cgguuuaccugaaggacuu

SEQ ID NO: 10099 - RNA, 19 nt, Artificial Sequence
  Synthetic
caucuucagcuguggaaua

SEQ ID NO: 10100 - RNA, 19 nt, Artificial Sequence
  Synthetic
caagaagcucagagagaca

SEQ ID NO: 10101 - RNA, 19 nt, Artificial Sequence
  Synthetic
ggaagacgggcguggagaa

SEQ ID NO: 10102 - RNA, 19 nt, Artificial Sequence
  Synthetic
gaaggaaggcugcggguca

SEQ ID NO: 10103 - RNA, 19 nt, Artificial Sequence
  Synthetic
guggagaacgugauggcaa

SEQ ID NO: 10104 - RNA, 19 nt, Artificial Sequence
  Synthetic
aaacagacgacguugacaa

SEQ ID NO: 10105 - RNA, 19 nt, Artificial Sequence
  Synthetic
aggacagacugcaggguca

SEQ ID NO: 10106 - RNA, 19 nt, Artificial Sequence
  Synthetic
aguccaggaucaaucgaaa

SEQ ID NO: 10107 - RNA, 19 nt, Artificial Sequence
  Synthetic
caaaauacaccaugaugaa

SEQ ID NO: 10108 - RNA, 19 nt, Artificial Sequence
  Synthetic
aagaaaggcugaggaugaa

SEQ ID NO: 10109 - RNA, 19 nt, Artificial Sequence
  Synthetic
aggcagaguugcagauuug

SEQ ID NO: 10110 - RNA, 19 nt, Artificial Sequence
  Synthetic
guggaauaguguuggccga

SEQ ID NO: 10111 - RNA, 19 nt, Artificial Sequence
  Synthetic
uguaagaaaggcugaggau

SEQ ID NO: 10112 - RNA, 19 nt, Artificial Sequence
  Synthetic
uucaagaagcucagagaga

SEQ ID NO: 10113 - RNA, 19 nt, Artificial Sequence
  Synthetic
acaccaugaugaagacuca

SEQ ID NO: 10114 - RNA, 19 nt, Artificial Sequence
  Synthetic
cuguucaaguccaggauca

SEQ ID NO: 10115 - RNA, 19 nt, Artificial Sequence
  Synthetic
gugcagggugugagcauca

SEQ ID NO: 10116 - RNA, 19 nt, Artificial Sequence
  Synthetic
cugaggaugaacaggaaga

SEQ ID NO: 10117 - RNA, 19 nt, Artificial Sequence
  Synthetic
caagacaguuucacagcuu

SEQ ID NO: 10118 - RNA, 19 nt, Artificial Sequence
  Synthetic
ucuccagccuccugaagaa

SEQ ID NO: 10119 - RNA, 19 nt, Artificial Sequence
  Synthetic
gcucuaaugucuugcugga

SEQ ID NO: 10120 - RNA, 19 nt, Artificial Sequence
  Synthetic
gggugcagggugugagcau

SEQ ID NO: 10121 - RNA, 19 nt, Artificial Sequence
  Synthetic
ggcugaggaugaacaggaa

SEQ ID NO: 10122 - RNA, 19 nt, Artificial Sequence
  Synthetic
aaucaaaaccgcaaaauca

SEQ ID NO: 10123 - RNA, 19 nt, Artificial Sequence
  Synthetic
ccgaugacuucaaucaaaa

SEQ ID NO: 10124 - RNA, 19 nt, Artificial Sequence
  Synthetic
aaauacaccaugaugaaga

SEQ ID NO: 10125 - RNA, 19 nt, Artificial Sequence
  Synthetic
caucagaguuguaccauaa

SEQ ID NO: 10126 - RNA, 19 nt, Artificial Sequence
  Synthetic
gagcaagagaaaugaggaa

SEQ ID NO: 10127 - RNA, 19 nt, Artificial Sequence
  Synthetic
guauguagaccaagguaaa

SEQ ID NO: 10128 - RNA, 19 nt, Artificial Sequence
  Synthetic
aaguggaacaagagaauua

SEQ ID NO: 10129 - RNA, 19 nt, Artificial Sequence
  Synthetic
uguaagaagcauuggaaga

SEQ ID NO: 10130 - RNA, 19 nt, Artificial Sequence
  Synthetic
gcacauucgaaucgguaua

SEQ ID NO: 10131 - RNA, 19 nt, Artificial Sequence
  Synthetic
agacagaaugacucagaaa

SEQ ID NO: 10132 - RNA, 19 nt, Artificial Sequence
  Synthetic
agccagagagcaagagaaa

SEQ ID NO: 10133 - RNA, 19 nt, Artificial Sequence
  Synthetic
gaugaaagccagaauaaca

SEQ ID NO: 10134 - RNA, 19 nt, Artificial Sequence
  Synthetic
ccaaugucaccguggauaa

SEQ ID NO: 10135 - RNA, 19 nt, Artificial Sequence
  Synthetic
gccaagagaaugaucaaua

SEQ ID NO: 10136 - RNA, 19 nt, Artificial Sequence
  Synthetic
agagaagaguuaucaggaa

SEQ ID NO: 10137 - RNA, 19 nt, Artificial Sequence
  Synthetic
uuagagaauugauggagaa

SEQ ID NO: 10138 - RNA, 19 nt, Artificial Sequence
  Synthetic
gggacaucgucgagcuauu

SEQ ID NO: 10139 - RNA, 19 nt, Artificial Sequence
  Synthetic
gguacaugccagaagagua

SEQ ID NO: 10140 - RNA, 19 nt, Artificial Sequence
  Synthetic
ccagagagcaagagaaaug

SEQ ID NO: 10141 - RNA, 19 nt, Artificial Sequence
  Synthetic
uuacagagacugagaaguu

SEQ ID NO: 10142 - RNA, 19 nt, Artificial Sequence
  Synthetic
aagcauuggaagagguuuu

SEQ ID NO: 10143 - RNA, 19 nt, Artificial Sequence
  Synthetic
agguaaaaguggaacaaga

SEQ ID NO: 10144 - RNA, 19 nt, Artificial Sequence
  Synthetic
aaacagaugucuacagcuu

SEQ ID NO: 10145 - RNA, 19 nt, Artificial Sequence
  Synthetic
cuagaaauuuccacaaaga

SEQ ID NO: 10146 - RNA, 19 nt, Artificial Sequence
  Synthetic
gggaugaauaugaacagua

SEQ ID NO: 10147 - RNA, 19 nt, Artificial Sequence
  Synthetic
gcaguaaacaucuguggua

SEQ ID NO: 10148 - RNA, 19 nt, Artificial Sequence
  Synthetic
cagaagaguacaucagaca

SEQ ID NO: 10149 - RNA, 19 nt, Artificial Sequence
  Synthetic
aauuggagaaggagagauu

SEQ ID NO: 10150 - RNA, 19 nt, Artificial Sequence
  Synthetic
aggauguagaguaguguua

SEQ ID NO: 10151 - RNA, 19 nt, Artificial Sequence
  Synthetic
cgggcaaaguuaagaccau

SEQ ID NO: 10152 - RNA, 19 nt, Artificial Sequence
  Synthetic
aggaauauccaaagccauu

SEQ ID NO: 10153 - RNA, 19 nt, Artificial Sequence
  Synthetic
cagcuuuggaauuguaaua

SEQ ID NO: 10154 - RNA, 19 nt, Artificial Sequence
  Synthetic
agagaaugaucaauaguga

SEQ ID NO: 10155 - RNA, 19 nt, Artificial Sequence
  Synthetic
ugacaaaguugaaggaauu

SEQ ID NO: 10156 - RNA, 19 nt, Artificial Sequence
  Synthetic
gcaguuugaucaagaaaua

SEQ ID NO: 10157 - RNA, 19 nt, Artificial Sequence
  Synthetic
ugacauuacuacugaagaa

SEQ ID NO: 10158 - RNA, 19 nt, Artificial Sequence
  Synthetic
cuguaaagcuuuggacaua

SEQ ID NO: 10159 - RNA, 19 nt, Artificial Sequence
  Synthetic
gggcaggaauagaagauga

SEQ ID NO: 10160 - RNA, 19 nt, Artificial Sequence
  Synthetic
gcuaauaucugcugugcuu

SEQ ID NO: 10161 - RNA, 19 nt, Artificial Sequence
  Synthetic
ggaacugaauucugccaaa

SEQ ID NO: 10162 - RNA, 19 nt, Artificial Sequence
  Synthetic
ccucaauguuggacuaauu

SEQ ID NO: 10163 - RNA, 19 nt, Artificial Sequence
  Synthetic
gcacaugagaugcaagauu

SEQ ID NO: 10164 - RNA, 19 nt, Artificial Sequence
  Synthetic
aaggagauuugaagcauua

SEQ ID NO: 10165 - RNA, 19 nt, Artificial Sequence
  Synthetic
gggaggauuuggaguugua

SEQ ID NO: 10166 - RNA, 19 nt, Artificial Sequence
  Synthetic
guauauaaaggcuacguaa

SEQ ID NO: 10167 - RNA, 19 nt, Artificial Sequence
  Synthetic
aaauaagagcccagacauu

SEQ ID NO: 10168 - RNA, 19 nt, Artificial Sequence
  Synthetic
ccucaguuauugcuagaua

SEQ ID NO: 10169 - RNA, 19 nt, Artificial Sequence
  Synthetic
gcaaagugucaacaugaaa

SEQ ID NO: 10170 - RNA, 19 nt, Artificial Sequence
  Synthetic
caagaaggauggaagaagu

SEQ ID NO: 10171 - RNA, 19 nt, Artificial Sequence
  Synthetic
ccucaagaaggauggaaga

SEQ ID NO: 10172 - RNA, 19 nt, Artificial Sequence
  Synthetic
cuauaacaguucagcaaaa

SEQ ID NO: 10173 - RNA, 19 nt, Artificial Sequence
  Synthetic
agcuuugcguggagaaaua

SEQ ID NO: 10174 - RNA, 19 nt, Artificial Sequence
  Synthetic
caaauaucuuacuggauga

SEQ ID NO: 10175 - RNA, 19 nt, Artificial Sequence
  Synthetic
gaacaaacccauaacacca

SEQ ID NO: 10176 - RNA, 19 nt, Artificial Sequence
  Synthetic
ccucaaguccagaaaauaa

SEQ ID NO: 10177 - RNA, 19 nt, Artificial Sequence
  Synthetic
guucauugcuagacagacu

SEQ ID NO: 10178 - RNA, 19 nt, Artificial Sequence
  Synthetic
cuacugaagaacugaaaca

SEQ ID NO: 10179 - RNA, 19 nt, Artificial Sequence
  Synthetic
gaacaaagcuauaugccac

SEQ ID NO: 10180 - RNA, 19 nt, Artificial Sequence
  Synthetic
cuaauuugcuguaaagcuu

SEQ ID NO: 10181 - RNA, 19 nt, Artificial Sequence
  Synthetic
gaauagaagaugaacaaac

SEQ ID NO: 10182 - RNA, 19 nt, Artificial Sequence
  Synthetic
gcaggacagugguuauuaa

SEQ ID NO: 10183 - RNA, 19 nt, Artificial Sequence
  Synthetic
gugcuggacuucuaauaua

SEQ ID NO: 10184 - RNA, 19 nt, Artificial Sequence
  Synthetic
cugcaagagaugacagcuu

SEQ ID NO: 10185 - RNA, 19 nt, Artificial Sequence
  Synthetic
uguaaagaguggagcaaau

SEQ ID NO: 10186 - RNA, 19 nt, Artificial Sequence
  Synthetic
gagaagaaguggcggcaca

SEQ ID NO: 10187 - RNA, 19 nt, Artificial Sequence
  Synthetic
guaauugaauggaagcaaa

SEQ ID NO: 10188 - RNA, 19 nt, Artificial Sequence
  Synthetic
gaauaaugagucugcauaa

SEQ ID NO: 10189 - RNA, 19 nt, Artificial Sequence
  Synthetic
acaaagaaccugauuggua

SEQ ID NO: 10190 - RNA, 19 nt, Artificial Sequence
  Synthetic
gggcugacuccaagaacaa

SEQ ID NO: 10191 - RNA, 19 nt, Artificial Sequence
  Synthetic
cuaaaugaccucagcaaau

SEQ ID NO: 10192 - RNA, 19 nt, Artificial Sequence
  Synthetic
gaugugggauggagguaua

SEQ ID NO: 10193 - RNA, 19 nt, Artificial Sequence
  Synthetic
caaagaaccugauugguau

SEQ ID NO: 10194 - RNA, 19 nt, Artificial Sequence
  Synthetic
ggacaucacagcagaauga

SEQ ID NO: 10195 - RNA, 19 nt, Artificial Sequence
  Synthetic
gcauaaacuucaucuucaa

SEQ ID NO: 10196 - RNA, 19 nt, Artificial Sequence
  Synthetic
auggaaagcuguggacaaa

SEQ ID NO: 10197 - RNA, 19 nt, Artificial Sequence
  Synthetic
acuacgagaacgagaagaa

SEQ ID NO: 10198 - RNA, 19 nt, Artificial Sequence
  Synthetic
caauaggccauguuaauua

SEQ ID NO: 10199 - RNA, 19 nt, Artificial Sequence
  Synthetic
gcacugaggaguacaugaa

SEQ ID NO: 10200 - RNA, 19 nt, Artificial Sequence
  Synthetic
uauggaaagcuguggacaa

SEQ ID NO: 10201 - RNA, 19 nt, Artificial Sequence
  Synthetic
ggauggagguauacaaugu

SEQ ID NO: 10202 - RNA, 19 nt, Artificial Sequence
  Synthetic
uaagaaucauagugccaua

SEQ ID NO: 10203 - RNA, 19 nt, Artificial Sequence
  Synthetic
gacaauaggccauguuaau

SEQ ID NO: 10204 - RNA, 19 nt, Artificial Sequence
  Synthetic
cauauaaaccugauguuga

SEQ ID NO: 10205 - RNA, 19 nt, Artificial Sequence
  Synthetic
caauauugaauuugggagu

SEQ ID NO: 10206 - RNA, 19 nt, Artificial Sequence
  Synthetic
gugaggaggagcuaagcaa

SEQ ID NO: 10207 - RNA, 19 nt, Artificial Sequence
  Synthetic
uggauuuggucaaggacuu

SEQ ID NO: 10208 - RNA, 19 nt, Artificial Sequence
  Synthetic
gcccaaggauauuuaauuu

SEQ ID NO: 10209 - RNA, 19 nt, Artificial Sequence
  Synthetic
gcacaggugacuacaugaa

SEQ ID NO: 10210 - RNA, 19 nt, Artificial Sequence
  Synthetic
agaacaugcacgagaccau

SEQ ID NO: 10211 - RNA, 19 nt, Artificial Sequence
  Synthetic
cugcagaggaggugagccu

SEQ ID NO: 10212 - RNA, 19 nt, Artificial Sequence
  Synthetic
ccaagauccuuuaagcaca

SEQ ID NO: 10213 - RNA, 19 nt, Artificial Sequence
  Synthetic
agacuggcacugaggagua

SEQ ID NO: 10214 - RNA, 19 nt, Artificial Sequence
  Synthetic
caaugugggcguuuguaaa

SEQ ID NO: 10215 - RNA, 19 nt, Artificial Sequence
  Synthetic
gugaauauguacugagcua

SEQ ID NO: 10216 - RNA, 19 nt, Artificial Sequence
  Synthetic
acucagaggugguggaaga

SEQ ID NO: 10217 - RNA, 19 nt, Artificial Sequence
  Synthetic
aaagaagaaacgaggaaua

SEQ ID NO: 10218 - RNA, 19 nt, Artificial Sequence
  Synthetic
ggaaugggcaugaaggaua

SEQ ID NO: 10219 - RNA, 19 nt, Artificial Sequence
  Synthetic
gaagaaacgaggaauaaua

SEQ ID NO: 10220 - RNA, 19 nt, Artificial Sequence
  Synthetic
gaguaucagccgagacaaa

SEQ ID NO: 10221 - RNA, 19 nt, Artificial Sequence
  Synthetic
ggagagaaauaaagagucu

SEQ ID NO: 10222 - RNA, 19 nt, Artificial Sequence
  Synthetic
ggacuuuaguagagacuga

SEQ ID NO: 10223 - RNA, 19 nt, Artificial Sequence
  Synthetic
guuaaugacuuuggaguua

SEQ ID NO: 10224 - RNA, 19 nt, Artificial Sequence
  Synthetic
caaauaaucuggaaaccua

SEQ ID NO: 10225 - RNA, 19 nt, Artificial Sequence
  Synthetic
gcaguuaucugguggaaaa

SEQ ID NO: 10226 - RNA, 19 nt, Artificial Sequence
  Synthetic
uggagagccucaagauaaa

SEQ ID NO: 10227 - RNA, 19 nt, Artificial Sequence
  Synthetic
gggaauaaauacaaagaug

SEQ ID NO: 10228 - RNA, 19 nt, Artificial Sequence
  Synthetic
guggagagccucaagauaa

SEQ ID NO: 10229 - RNA, 19 nt, Artificial Sequence
  Synthetic
gagaacaaucccuguauaa

SEQ ID NO: 10230 - RNA, 19 nt, Artificial Sequence
  Synthetic
gaaauuguuuggugggaga

SEQ ID NO: 10231 - RNA, 19 nt, Artificial Sequence
  Synthetic
ggacacaggcaaagaagga

SEQ ID NO: 10232 - RNA, 19 nt, Artificial Sequence
  Synthetic
gcaaaaucccguaugaaaa

SEQ ID NO: 10233 - RNA, 19 nt, Artificial Sequence
  Synthetic
agaacuggaucaugaacaa

SEQ ID NO: 10234 - RNA, 19 nt, Artificial Sequence
  Synthetic
gcaauuggcucuuucuaaa

SEQ ID NO: 10235 - RNA, 19 nt, Artificial Sequence
  Synthetic
gaacaaagagcaugagucu

SEQ ID NO: 10236 - RNA, 19 nt, Artificial Sequence
  Synthetic
caacaaaagagaagaacuu

SEQ ID NO: 10237 - RNA, 19 nt, Artificial Sequence
  Synthetic
aggcugaaguaaugaugaa

SEQ ID NO: 10238 - RNA, 19 nt, Artificial Sequence
  Synthetic
gagagagacaugaguaaga

SEQ ID NO: 10239 - RNA, 19 nt, Artificial Sequence
  Synthetic
cugaagaaacuguggucau

SEQ ID NO: 10240 - RNA, 19 nt, Artificial Sequence
  Synthetic
uuaaagaagaaacgaggaa

SEQ ID NO: 10241 - RNA, 19 nt, Artificial Sequence
  Synthetic
ggcugaaauugcagaauca

SEQ ID NO: 10242 - RNA, 19 nt, Artificial Sequence
  Synthetic
ccaaagugauggaacuaga

SEQ ID NO: 10243 - RNA, 19 nt, Artificial Sequence
  Synthetic
gcccuaggguugagcaauu

SEQ ID NO: 10244 - RNA, 19 nt, Artificial Sequence
  Synthetic
aagaagaaacgaggaauaa

SEQ ID NO: 10245 - RNA, 19 nt, Artificial Sequence
  Synthetic
cuaaagggaaggaaaggaa

SEQ ID NO: 10246 - RNA, 19 nt, Artificial Sequence
  Synthetic
ggaggaagaugcagaccuu

SEQ ID NO: 10247 - RNA, 19 nt, Artificial Sequence
  Synthetic
gcaaaucauuccaggucuu

SEQ ID NO: 10248 - RNA, 19 nt, Artificial Sequence
  Synthetic
ucacagaccuccugaacca

SEQ ID NO: 10249 - RNA, 19 nt, Artificial Sequence
  Synthetic
ggaggacgcuagagaaagu

SEQ ID NO: 10250 - RNA, 19 nt, Artificial Sequence
  Synthetic
ugacggagcuggacaagau

SEQ ID NO: 10251 - RNA, 19 nt, Artificial Sequence
  Synthetic
cugaaagggaagagaguug

SEQ ID NO: 10252 - RNA, 19 nt, Artificial Sequence
  Synthetic
uggacaagaucgagggcgu

SEQ ID NO: 10253 - RNA, 19 nt, Artificial Sequence
  Synthetic
ggacauuugagaucagaga

SEQ ID NO: 10254 - RNA, 19 nt, Artificial Sequence
  Synthetic
gcgccugugcugaggauuu

SEQ ID NO: 10255 - RNA, 19 nt, Artificial Sequence
  Synthetic
gggcagaggccaucagaac

SEQ ID NO: 10256 - RNA, 19 nt, Artificial Sequence
  Synthetic
gaggauuugugcugugauu

SEQ ID NO: 10257 - RNA, 19 nt, Artificial Sequence
  Synthetic
uagagaaagugcugagugu

SEQ ID NO: 10258 - RNA, 19 nt, Artificial Sequence
  Synthetic
agaagaacggcuugacuuu

SEQ ID NO: 10259 - RNA, 19 nt, Artificial Sequence
  Synthetic
gagaagaacggcuugacuu

SEQ ID NO: 10260 - RNA, 19 nt, Artificial Sequence
  Synthetic
ggauggagguugugcagcu

SEQ ID NO: 10261 - RNA, 19 nt, Artificial Sequence
  Synthetic
gugcagaccuccuaacuga

SEQ ID NO: 10262 - RNA, 19 nt, Artificial Sequence
  Synthetic
ccaugcggcugcuggagaa

SEQ ID NO: 10263 - RNA, 19 nt, Artificial Sequence
  Synthetic
ccugcgugguccagaauuu

SEQ ID NO: 10264 - RNA, 19 nt, Artificial Sequence
  Synthetic
gcaucgacaucaucaucaa

SEQ ID NO: 10265 - RNA, 19 nt, Artificial Sequence
  Synthetic
ccuugaagccgaccagaau

SEQ ID NO: 10266 - RNA, 19 nt, Artificial Sequence
  Synthetic
ucucugaugucaugaucua

SEQ ID NO: 10267 - RNA, 19 nt, Artificial Sequence
  Synthetic
uggcugagcgagaagaaaa

SEQ ID NO: 10268 - RNA, 19 nt, Artificial Sequence
  Synthetic
gucuuaagauagcaguuua

SEQ ID NO: 10269 - RNA, 19 nt, Artificial Sequence
  Synthetic
caucagaccgugaguccau

SEQ ID NO: 10270 - RNA, 19 nt, Artificial Sequence
  Synthetic
acauggaagacgacaggau

SEQ ID NO: 10271 - RNA, 19 nt, Artificial Sequence
  Synthetic
uccggaagauugaggccua

SEQ ID NO: 10272 - RNA, 19 nt, Artificial Sequence
  Synthetic
ccucugcaguccuggaaga

SEQ ID NO: 10273 - RNA, 19 nt, Artificial Sequence
  Synthetic
gaucggugcaugugagagu

SEQ ID NO: 10274 - RNA, 19 nt, Artificial Sequence
  Synthetic
caacaacuaaccacguuua

SEQ ID NO: 10275 - RNA, 19 nt, Artificial Sequence
  Synthetic
ggacuuaccuagaggagga

SEQ ID NO: 10276 - RNA, 19 nt, Artificial Sequence
  Synthetic
ggaaggacauguacaagaa

SEQ ID NO: 10277 - RNA, 19 nt, Artificial Sequence
  Synthetic
caucgagggcaucaagaaa

SEQ ID NO: 10278 - RNA, 19 nt, Artificial Sequence
  Synthetic
cggaaggacauguacaaga

SEQ ID NO: 10279 - RNA, 19 nt, Artificial Sequence
  Synthetic
ccaaaugacacuaacuuau

SEQ ID NO: 10280 - RNA, 19 nt, Artificial Sequence
  Synthetic
ugugcaaggagaugaggaa

SEQ ID NO: 10281 - RNA, 19 nt, Artificial Sequence
  Synthetic
ucauaagcccuuucaagaa

SEQ ID NO: 10282 - RNA, 19 nt, Artificial Sequence
  Synthetic
cuuugaagaguuugugcaa

SEQ ID NO: 10283 - RNA, 19 nt, Artificial Sequence
  Synthetic
gccaaaugacacuaacuua

SEQ ID NO: 10284 - RNA, 19 nt, Artificial Sequence
  Synthetic
uagaggaggagcugaccaa

SEQ ID NO: 10285 - RNA, 19 nt, Artificial Sequence
  Synthetic
gcaucgagggcaucaagaa

SEQ ID NO: 10286 - RNA, 19 nt, Artificial Sequence
  Synthetic
aggacgaccugcugagcga

SEQ ID NO: 10287 - RNA, 19 nt, Artificial Sequence
  Synthetic
cgaggacgugggucagaaa

SEQ ID NO: 10288 - RNA, 19 nt, Artificial Sequence
  Synthetic
aggaagugcugaggcggua

SEQ ID NO: 10289 - RNA, 19 nt, Artificial Sequence
  Synthetic
agaaaaugcuggcggugga

SEQ ID NO: 10290 - RNA, 19 nt, Artificial Sequence
  Synthetic
cugcugagcgacagugaga

SEQ ID NO: 10291 - RNA, 19 nt, Artificial Sequence
  Synthetic
uggcagaagauccggacca

SEQ ID NO: 10292 - RNA, 19 nt, Artificial Sequence
  Synthetic
gcaccgacuucaagacuac

SEQ ID NO: 10293 - RNA, 19 nt, Artificial Sequence
  Synthetic
gcguguggcucaucgacuu

SEQ ID NO: 10294 - RNA, 19 nt, Artificial Sequence
  Synthetic
gggacacccuggagguauc

SEQ ID NO: 10295 - RNA, 19 nt, Artificial Sequence
  Synthetic
gucauaagcccuuucaaga

SEQ ID NO: 10296 - RNA, 19 nt, Artificial Sequence
  Synthetic
ggugccagaccgcggauuu

SEQ ID NO: 10297 - RNA, 19 nt, Artificial Sequence
  Synthetic
gcgaggacgugggucagaa

SEQ ID NO: 10298 - RNA, 19 nt, Artificial Sequence
  Synthetic
gugcugaggcgguaucuga

SEQ ID NO: 10299 - RNA, 19 nt, Artificial Sequence
  Synthetic
gaaggacauguacaagaaa

SEQ ID NO: 10300 - RNA, 19 nt, Artificial Sequence
  Synthetic
ggucauaagcccuuucaag

SEQ ID NO: 10301 - RNA, 19 nt, Artificial Sequence
  Synthetic
gcaggugcuucgcgucuuu

SEQ ID NO: 10302 - RNA, 19 nt, Artificial Sequence
  Synthetic
ggcagaagauccggaccau

SEQ ID NO: 10303 - RNA, 19 nt, Artificial Sequence
  Synthetic
aaaugggcgucaggacuua

SEQ ID NO: 10304 - RNA, 19 nt, Artificial Sequence
  Synthetic
gcaaggagaugaggaagug

SEQ ID NO: 10305 - RNA, 19 nt, Artificial Sequence
  Synthetic
gguucaggaucgagggaau

SEQ ID NO: 10306 - RNA, 19 nt, Artificial Sequence
  Synthetic
ggauagauggauugugaaa

SEQ ID NO: 10307 - RNA, 19 nt, Artificial Sequence
  Synthetic
cagcagaaaccuagaguga

SEQ ID NO: 10308 - RNA, 19 nt, Artificial Sequence
  Synthetic
cggaggaggccaagaggaa

SEQ ID NO: 10309 - RNA, 19 nt, Artificial Sequence
  Synthetic
gcagaaugcuggagccuuu

SEQ ID NO: 10310 - RNA, 19 nt, Artificial Sequence
  Synthetic
gaagaggagaugagaguuu

SEQ ID NO: 10311 - RNA, 19 nt, Artificial Sequence
  Synthetic
ggagaaaacugaacuguua

SEQ ID NO: 10312 - RNA, 19 nt, Artificial Sequence
  Synthetic
ccuugcagauauagaaaua

SEQ ID NO: 10313 - RNA, 19 nt, Artificial Sequence
  Synthetic
ggaccuaccuggaggagga

SEQ ID NO: 10314 - RNA, 19 nt, Artificial Sequence
  Synthetic
gaugaucgacuuugggaaa

SEQ ID NO: 10315 - RNA, 19 nt, Artificial Sequence
  Synthetic
ggacacagagggagacuau

SEQ ID NO: 10316 - RNA, 19 nt, Artificial Sequence
  Synthetic
caucauuaauucagacgua

SEQ ID NO: 10317 - RNA, 19 nt, Artificial Sequence
  Synthetic
acaagaaggaacaggccaa

SEQ ID NO: 10318 - RNA, 19 nt, Artificial Sequence
  Synthetic
ggaauguggaggcgggaau

SEQ ID NO: 10319 - RNA, 19 nt, Artificial Sequence
  Synthetic
gaagaagcacugugaguca

SEQ ID NO: 10320 - RNA, 19 nt, Artificial Sequence
  Synthetic
agagaaaugcccagucuua

SEQ ID NO: 10321 - RNA, 19 nt, Artificial Sequence
  Synthetic
augcaaaccuuccugaaua

SEQ ID NO: 10322 - RNA, 19 nt, Artificial Sequence
  Synthetic
gcaaagugucuuccgauua

SEQ ID NO: 10323 - RNA, 19 nt, Artificial Sequence
  Synthetic
ggaaggacauguaccagaa

SEQ ID NO: 10324 - RNA, 19 nt, Artificial Sequence
  Synthetic
aaucauggaggaagauaaa

SEQ ID NO: 10325 - RNA, 19 nt, Artificial Sequence
  Synthetic
agcaaaucauggaggaaga

SEQ ID NO: 10326 - RNA, 19 nt, Artificial Sequence
  Synthetic
gaucgagggaaucaagaaa

SEQ ID NO: 10327 - RNA, 19 nt, Artificial Sequence
  Synthetic
aaaucauggaggaagauaa

SEQ ID NO: 10328 - RNA, 19 nt, Artificial Sequence
  Synthetic
cugcgaaagaucugaaaga

SEQ ID NO: 10329 - RNA, 19 nt, Artificial Sequence
  Synthetic
gcgaaagaucugaaagaac

SEQ ID NO: 10330 - RNA, 19 nt, Artificial Sequence
  Synthetic
gagaguucacuaaaggaaa

SEQ ID NO: 10331 - RNA, 19 nt, Artificial Sequence
  Synthetic
ugggagagcccgugagcuu

SEQ ID NO: 10332 - RNA, 19 nt, Artificial Sequence
  Synthetic
ggagcaauguccagagacu

SEQ ID NO: 10333 - RNA, 19 nt, Artificial Sequence
  Synthetic
aaaccuagagugagcaaau

SEQ ID NO: 10334 - RNA, 19 nt, Artificial Sequence
  Synthetic
ggucugugcuucagccauu

SEQ ID NO: 10335 - RNA, 19 nt, Artificial Sequence
  Synthetic
ggaaagaauuguauacuga

SEQ ID NO: 10336 - RNA, 19 nt, Artificial Sequence
  Synthetic
ggaagaagcugaagacagu

SEQ ID NO: 10337 - RNA, 19 nt, Artificial Sequence
  Synthetic
ggacagagcuggaaacgca

SEQ ID NO: 10338 - RNA, 19 nt, Artificial Sequence
  Synthetic
ggaaggacauguaugagaa

SEQ ID NO: 10339 - RNA, 19 nt, Artificial Sequence
  Synthetic
ggacagagccauauacuga

SEQ ID NO: 10340 - RNA, 19 nt, Artificial Sequence
  Synthetic
ggacagacggacagacuga

SEQ ID NO: 10341 - RNA, 19 nt, Artificial Sequence
  Synthetic
ggucagagcuggagacgac

SEQ ID NO: 10342 - RNA, 19 nt, Artificial Sequence
  Synthetic
ggacacaacaggauauuga

SEQ ID NO: 10343 - RNA, 19 nt, Artificial Sequence
  Synthetic
ggaccuaucuggaagagga

SEQ ID NO: 10344 - RNA, 19 nt, Artificial Sequence
  Synthetic
ggaugauagacuucggcaa

SEQ ID NO: 10345 - RNA, 19 nt, Artificial Sequence
  Synthetic
uggaagaccuccuggcuga

SEQ ID NO: 10346 - RNA, 19 nt, Artificial Sequence
  Synthetic
ugaagacaguucugaagua

SEQ ID NO: 10347 - RNA, 19 nt, Artificial Sequence
  Synthetic
aggagaggauggucggauu

SEQ ID NO: 10348 - RNA, 19 nt, Artificial Sequence
  Synthetic
ggacaggucugggagcaaa

SEQ ID NO: 10349 - RNA, 19 nt, Artificial Sequence
  Synthetic
cagacugccucuugggaga

SEQ ID NO: 10350 - RNA, 19 nt, Artificial Sequence
  Synthetic
ugacaaaagugcuggagga

SEQ ID NO: 10351 - RNA, 19 nt, Artificial Sequence
  Synthetic
cacuggagcaggugacaaa

SEQ ID NO: 10352 - RNA, 19 nt, Artificial Sequence
  Synthetic
cggaaggacauguaugaga

SEQ ID NO: 10353 - RNA, 19 nt, Artificial Sequence
  Synthetic
uggagcagcugaugaaaga

SEQ ID NO: 10354 - RNA, 19 nt, Artificial Sequence
  Synthetic
ucgacgagucugaggauga

SEQ ID NO: 10355 - RNA, 19 nt, Artificial Sequence
  Synthetic
ccgagaggcccaagcaaaa

SEQ ID NO: 10356 - RNA, 19 nt, Artificial Sequence
  Synthetic
gcagaugggaccuguaaca

SEQ ID NO: 10357 - RNA, 19 nt, Artificial Sequence
  Synthetic
ggagcaaacccuggaagaa

SEQ ID NO: 10358 - RNA, 19 nt, Artificial Sequence
  Synthetic
uggaagaggagcuagugaa

SEQ ID NO: 10359 - RNA, 19 nt, Artificial Sequence
  Synthetic
uacaugcaguggagggaaa

SEQ ID NO: 10360 - RNA, 19 nt, Artificial Sequence
  Synthetic
gggagcaaacccuggaaga

SEQ ID NO: 10361 - RNA, 19 nt, Artificial Sequence
  Synthetic
cuggagaauugcugacuca

SEQ ID NO: 10362 - RNA, 19 nt, Artificial Sequence
  Synthetic
gcugauggcuccuggaaag

SEQ ID NO: 10363 - RNA, 19 nt, Artificial Sequence
  Synthetic
ggucacagacucagccaga

SEQ ID NO: 10364 - RNA, 19 nt, Artificial Sequence
  Synthetic
gcuggaaacgcauggguca

SEQ ID NO: 10365 - RNA, 19 nt, Artificial Sequence
  Synthetic
ccacauagcugaucugaaa

SEQ ID NO: 10366 - RNA, 19 nt, Artificial Sequence
  Synthetic
cgggaagccuuaaggaaua

SEQ ID NO: 10367 - RNA, 19 nt, Artificial Sequence
  Synthetic
cugaagagaagaagauaaa

SEQ ID NO: 10368 - RNA, 19 nt, Artificial Sequence
  Synthetic
acaagaaggaugaggagaa

SEQ ID NO: 10369 - RNA, 19 nt, Artificial Sequence
  Synthetic
ccaagaagacugaggugaa

SEQ ID NO: 10370 - RNA, 19 nt, Artificial Sequence
  Synthetic
cagaauacgccaucaauaa

SEQ ID NO: 10371 - RNA, 19 nt, Artificial Sequence
  Synthetic
gcacagaagacggaggaaa

SEQ ID NO: 10372 - RNA, 19 nt, Artificial Sequence
  Synthetic
ugagcuacuuggaggauaa

SEQ ID NO: 10373 - RNA, 19 nt, Artificial Sequence
  Synthetic
gcgauauauuccagaaaca

SEQ ID NO: 10374 - RNA, 19 nt, Artificial Sequence
  Synthetic
gagugaacaccaagugaaa

SEQ ID NO: 10375 - RNA, 19 nt, Artificial Sequence
  Synthetic
caagaaggaugaggagaaa

SEQ ID NO: 10376 - RNA, 19 nt, Artificial Sequence
  Synthetic
cgggaagaguggaacaauu

SEQ ID NO: 10377 - RNA, 19 nt, Artificial Sequence
  Synthetic
gcauuaacaagcaggacaa

SEQ ID NO: 10378 - RNA, 19 nt, Artificial Sequence
  Synthetic
ggaaccacgcucugggaaa

SEQ ID NO: 10379 - RNA, 19 nt, Artificial Sequence
  Synthetic
ugauugagaaagagagauu

SEQ ID NO: 10380 - RNA, 19 nt, Artificial Sequence
  Synthetic
acauuacggugcugaaaua

SEQ ID NO: 10381 - RNA, 19 nt, Artificial Sequence
  Synthetic
augagaacauugugaagua

SEQ ID NO: 10382 - RNA, 19 nt, Artificial Sequence
  Synthetic
gggaagaguggaacaauuu

SEQ ID NO: 10383 - RNA, 19 nt, Artificial Sequence
  Synthetic
ggaaauguguguacuaaaa

SEQ ID NO: 10384 - RNA, 19 nt, Artificial Sequence
  Synthetic
agaauaucaugguggaaga

SEQ ID NO: 10385 - RNA, 19 nt, Artificial Sequence
  Synthetic
cacagaagacggaggaaau

SEQ ID NO: 10386 - RNA, 19 nt, Artificial Sequence
  Synthetic
gcaagaaugcauugaacga

SEQ ID NO: 10387 - RNA, 19 nt, Artificial Sequence
  Synthetic
gcugguggcuacuaagaaa

SEQ ID NO: 10388 - RNA, 19 nt, Artificial Sequence
  Synthetic
ucugaagagaagaagauaa

SEQ ID NO: 10389 - RNA, 19 nt, Artificial Sequence
  Synthetic
aaaauaaacugaagcggaa

SEQ ID NO: 10390 - RNA, 19 nt, Artificial Sequence
  Synthetic
aagaaugcauugaacgaau

SEQ ID NO: 10391 - RNA, 19 nt, Artificial Sequence
  Synthetic
cugaauaaaugcaguaucu

SEQ ID NO: 10392 - RNA, 19 nt, Artificial Sequence
  Synthetic
acacuggacagcugaauaa

SEQ ID NO: 10393 - RNA, 19 nt, Artificial Sequence
  Synthetic
aaaucgagaucuuaaggaa

SEQ ID NO: 10394 - RNA, 19 nt, Artificial Sequence
  Synthetic
ggaaaugguauuaagcuca

SEQ ID NO: 10395 - RNA, 19 nt, Artificial Sequence
  Synthetic
gagcaaagauccaagacua

SEQ ID NO: 10396 - RNA, 19 nt, Artificial Sequence
  Synthetic
gaaauauauugguggagaa

SEQ ID NO: 10397 - RNA, 19 nt, Artificial Sequence
  Synthetic
acauaaagaaagugagaca

SEQ ID NO: 10398 - RNA, 19 nt, Artificial Sequence
  Synthetic
acagaaugcuggaacaaua

SEQ ID NO: 10399 - RNA, 19 nt, Artificial Sequence
  Synthetic
gcaaauagauccaguucuu

SEQ ID NO: 10400 - RNA, 19 nt, Artificial Sequence
  Synthetic
cugcaguggaggagauaaa

SEQ ID NO: 10401 - RNA, 19 nt, Artificial Sequence
  Synthetic
gccagaaacuugaaacuua

SEQ ID NO: 10402 - RNA, 19 nt, Artificial Sequence
  Synthetic
cagcaaguaugaugagcaa

SEQ ID NO: 10403 - RNA, 19 nt, Artificial Sequence
  Synthetic
aauuggagauuuuggguua

SEQ ID NO: 10404 - RNA, 19 nt, Artificial Sequence
  Synthetic
ugacagaaauggagggaac

SEQ ID NO: 10405 - RNA, 19 nt, Artificial Sequence
  Synthetic
agaacaggauuuacaguua

SEQ ID NO: 10406 - RNA, 19 nt, Artificial Sequence
  Synthetic
ggaguauguugcagaagaa

SEQ ID NO: 10407 - RNA, 19 nt, Artificial Sequence
  Synthetic
gaacgagaacagaguuaaa

SEQ ID NO: 10408 - RNA, 19 nt, Artificial Sequence
  Synthetic
uggauaaagcacacagaaa

SEQ ID NO: 10409 - RNA, 19 nt, Artificial Sequence
  Synthetic
gagaacgagaacagaguua

SEQ ID NO: 10410 - RNA, 19 nt, Artificial Sequence
  Synthetic
gauuuaugcucaugaacua

SEQ ID NO: 10411 - RNA, 19 nt, Artificial Sequence
  Synthetic
ggucaagagggaaacauaa

SEQ ID NO: 10412 - RNA, 19 nt, Artificial Sequence
  Synthetic
ccagaaacuugaaacuuaa

SEQ ID NO: 10413 - RNA, 19 nt, Artificial Sequence
  Synthetic
gcacagaauauguauguau

SEQ ID NO: 10414 - RNA, 19 nt, Artificial Sequence
  Synthetic
gaucuggcaacgagaaaua

SEQ ID NO: 10415 - RNA, 19 nt, Artificial Sequence
  Synthetic
cgaauaagguacagauuuc

SEQ ID NO: 10416 - RNA, 19 nt, Artificial Sequence
  Synthetic
auauauugguggagaacga

SEQ ID NO: 10417 - RNA, 19 nt, Artificial Sequence
  Synthetic
gaagagaaguaggagacua

SEQ ID NO: 10418 - RNA, 19 nt, Artificial Sequence
  Synthetic
ggaaauugaaauccugaaa

SEQ ID NO: 10419 - RNA, 19 nt, Artificial Sequence
  Synthetic
acauaaaacuucugcagua

SEQ ID NO: 10420 - RNA, 19 nt, Artificial Sequence
  Synthetic
aggcguacgaagagaagua

SEQ ID NO: 10421 - RNA, 19 nt, Artificial Sequence
  Synthetic
cauacauugagaagaguaa

SEQ ID NO: 10422 - RNA, 19 nt, Artificial Sequence
  Synthetic
uugacaaggaagcgaauaa

SEQ ID NO: 10423 - RNA, 19 nt, Artificial Sequence
  Synthetic
agagggaaacauaaagaaa

SEQ ID NO: 10424 - RNA, 19 nt, Artificial Sequence
  Synthetic
ggaacuaucuccaaauuuu

SEQ ID NO: 10425 - RNA, 19 nt, Artificial Sequence
  Synthetic
ucaacuaucuggaggacaa

SEQ ID NO: 10426 - RNA, 19 nt, Artificial Sequence
  Synthetic
agacagaggugcugcugaa

SEQ ID NO: 10427 - RNA, 19 nt, Artificial Sequence
  Synthetic
ggacagacaaccagauuuu

SEQ ID NO: 10428 - RNA, 19 nt, Artificial Sequence
  Synthetic
gaaccaaauuuaagacucu

SEQ ID NO: 10429 - RNA, 19 nt, Artificial Sequence
  Synthetic
aagcaaggaaccaaauuua

SEQ ID NO: 10430 - RNA, 19 nt, Artificial Sequence
  Synthetic
gguccuucaccaagauuua

SEQ ID NO: 10431 - RNA, 19 nt, Artificial Sequence
  Synthetic
ccuggauccugcuaagaaa

SEQ ID NO: 10432 - RNA, 19 nt, Artificial Sequence
  Synthetic
cgaucuucgaggagagaca

SEQ ID NO: 10433 - RNA, 19 nt, Artificial Sequence
  Synthetic
ggaagcugcagguggucaa

SEQ ID NO: 10434 - RNA, 19 nt, Artificial Sequence
  Synthetic
cccaauaccagcugaguca

SEQ ID NO: 10435 - RNA, 19 nt, Artificial Sequence
  Synthetic
ccucaucucuucagacuau

SEQ ID NO: 10436 - RNA, 19 nt, Artificial Sequence
  Synthetic
gcuaagaaacuccaauuuu

SEQ ID NO: 10437 - RNA, 19 nt, Artificial Sequence
  Synthetic
cugcucacccagagggcaa

SEQ ID NO: 10438 - RNA, 19 nt, Artificial Sequence
  Synthetic
gcacccaaguccugcugua

SEQ ID NO: 10439 - RNA, 19 nt, Artificial Sequence
  Synthetic
cgggagagcugcugaagac

SEQ ID NO: 10440 - RNA, 19 nt, Artificial Sequence
  Synthetic
gugauuucauugucaagua

SEQ ID NO: 10441 - RNA, 19 nt, Artificial Sequence
  Synthetic
cacaagaacugcauggagu

SEQ ID NO: 10442 - RNA, 19 nt, Artificial Sequence
  Synthetic
gauuauaagggcugccuca

SEQ ID NO: 10443 - RNA, 19 nt, Artificial Sequence
  Synthetic
uagacauguaucugcgaaa

SEQ ID NO: 10444 - RNA, 19 nt, Artificial Sequence
  Synthetic
cgggaggcgcagacacuua

SEQ ID NO: 10445 - RNA, 19 nt, Artificial Sequence
  Synthetic
agaacugcauggagucauu

SEQ ID NO: 10446 - RNA, 19 nt, Artificial Sequence
  Synthetic
ccacaucauccuugguuca

SEQ ID NO: 10447 - RNA, 19 nt, Artificial Sequence
  Synthetic
uguacgagcucuucaccua

SEQ ID NO: 10448 - RNA, 19 nt, Artificial Sequence
  Synthetic
ggaauggugcccagcucua

SEQ ID NO: 10449 - RNA, 19 nt, Artificial Sequence
  Synthetic
uggucaaacagcuggccua

SEQ ID NO: 10450 - RNA, 19 nt, Artificial Sequence
  Synthetic
cgugaugggcuguggaaug

SEQ ID NO: 10451 - RNA, 19 nt, Artificial Sequence
  Synthetic
agagacaccucaaguacau

SEQ ID NO: 10452 - RNA, 19 nt, Artificial Sequence
  Synthetic
cagcagucuucgagagcuc

SEQ ID NO: 10453 - RNA, 19 nt, Artificial Sequence
  Synthetic
ccaaguacaucauggaccu

SEQ ID NO: 10454 - RNA, 19 nt, Artificial Sequence
  Synthetic
ucauggaugccaagcacaa

SEQ ID NO: 10455 - RNA, 19 nt, Artificial Sequence
  Synthetic
ccaaugaggugguggcaau

SEQ ID NO: 10456 - RNA, 19 nt, Artificial Sequence
  Synthetic
aaagagaacugcacagaaa

SEQ ID NO: 10457 - RNA, 19 nt, Artificial Sequence
  Synthetic
acuuaaaggccauggaaau

SEQ ID NO: 10458 - RNA, 19 nt, Artificial Sequence
  Synthetic
caauaagaggcgagaaaga

SEQ ID NO: 10459 - RNA, 19 nt, Artificial Sequence
  Synthetic
gcauugauucauagggaua

SEQ ID NO: 10460 - RNA, 19 nt, Artificial Sequence
  Synthetic
ggauauuaaagcaggaaau

SEQ ID NO: 10461 - RNA, 19 nt, Artificial Sequence
  Synthetic
acaaaggacugaaguuaua

SEQ ID NO: 10462 - RNA, 19 nt, Artificial Sequence
  Synthetic
ggaaguuacuccaaagaau

SEQ ID NO: 10463 - RNA, 19 nt, Artificial Sequence
  Synthetic
gggaacagaugucagguua

SEQ ID NO: 10464 - RNA, 19 nt, Artificial Sequence
  Synthetic
caugagaaauggcaagaua

SEQ ID NO: 10465 - RNA, 19 nt, Artificial Sequence
  Synthetic
caguaugaacagaguauaa

SEQ ID NO: 10466 - RNA, 19 nt, Artificial Sequence
  Synthetic
cagaaugggauuugggaau

SEQ ID NO: 10467 - RNA, 19 nt, Artificial Sequence
  Synthetic
gaacgcagcgagagaauaa

SEQ ID NO: 10468 - RNA, 19 nt, Artificial Sequence
  Synthetic
gagcacaccuugagcagaa

SEQ ID NO: 10469 - RNA, 19 nt, Artificial Sequence
  Synthetic
ggacuacagaugagauuaa

SEQ ID NO: 10470 - RNA, 19 nt, Artificial Sequence
  Synthetic
acauaucaguggugacaua

SEQ ID NO: 10471 - RNA, 19 nt, Artificial Sequence
  Synthetic
guauaaagcacucaagaau

SEQ ID NO: 10472 - RNA, 19 nt, Artificial Sequence
  Synthetic
gaagcagacccaugagaaa

SEQ ID NO: 10473 - RNA, 19 nt, Artificial Sequence
  Synthetic
ccaagaagcaaguggcuau

SEQ ID NO: 10474 - RNA, 19 nt, Artificial Sequence
  Synthetic
ccauggaaaugcaaauuaa

SEQ ID NO: 10475 - RNA, 19 nt, Artificial Sequence
  Synthetic
ccaagaaagagaagcaaga

SEQ ID NO: 10476 - RNA, 19 nt, Artificial Sequence
  Synthetic
agaacaagcugaaggcuga

SEQ ID NO: 10477 - RNA, 19 nt, Artificial Sequence
  Synthetic
uacaauaagaggcgagaaa

SEQ ID NO: 10478 - RNA, 19 nt, Artificial Sequence
  Synthetic
agaagaaguuccagcaaca

SEQ ID NO: 10479 - RNA, 19 nt, Artificial Sequence
  Synthetic
gcugaaggacccagagauu

SEQ ID NO: 10480 - RNA, 19 nt, Artificial Sequence
  Synthetic
uggaaaggcaagagcgaga

SEQ ID NO: 10481 - RNA, 19 nt, Artificial Sequence
  Synthetic
aggacaguaugaugggaaa

SEQ ID NO: 10482 - RNA, 19 nt, Artificial Sequence
  Synthetic
ccaaggaagagcaugauaa

SEQ ID NO: 10483 - RNA, 19 nt, Artificial Sequence
  Synthetic
agaugcaguucgugagcua

SEQ ID NO: 10484 - RNA, 19 nt, Artificial Sequence
  Synthetic
ccaauaaaccaacaacaaa

SEQ ID NO: 10485 - RNA, 19 nt, Artificial Sequence
  Synthetic
ggguaaagauugaugaaga

SEQ ID NO: 10486 - RNA, 19 nt, Artificial Sequence
  Synthetic
gguaaagauugaugaagaa

SEQ ID NO: 10487 - RNA, 19 nt, Artificial Sequence
  Synthetic
cggagaagaacgugguuaa

SEQ ID NO: 10488 - RNA, 19 nt, Artificial Sequence
  Synthetic
ggagugagaugaagaaauu

SEQ ID NO: 10489 - RNA, 19 nt, Artificial Sequence
  Synthetic
ugaaagagacacaggaaau

SEQ ID NO: 10490 - RNA, 19 nt, Artificial Sequence
  Synthetic
ccucagugauguagaagaa

SEQ ID NO: 10491 - RNA, 19 nt, Artificial Sequence
  Synthetic
gugcaaaaguggaggcauu

SEQ ID NO: 10492 - RNA, 19 nt, Artificial Sequence
  Synthetic
uagaagaaccagaaguaaa

SEQ ID NO: 10493 - RNA, 19 nt, Artificial Sequence
  Synthetic
ccucaaagaaguagcagua

SEQ ID NO: 10494 - RNA, 19 nt, Artificial Sequence
  Synthetic
gagaaaagcuugucuuaaa

SEQ ID NO: 10495 - RNA, 19 nt, Artificial Sequence
  Synthetic
gauagagauuggagugcaa

SEQ ID NO: 10496 - RNA, 19 nt, Artificial Sequence
  Synthetic
gaaaggaagacuaacguua

SEQ ID NO: 10497 - RNA, 19 nt, Artificial Sequence
  Synthetic
caccauggguuuagaacaa

SEQ ID NO: 10498 - RNA, 19 nt, Artificial Sequence
  Synthetic
ggaugaacauugugaacga

SEQ ID NO: 10499 - RNA, 19 nt, Artificial Sequence
  Synthetic
cuacauuguucuuccgaua

SEQ ID NO: 10500 - RNA, 19 nt, Artificial Sequence
  Synthetic
gggcauguacugacgauua

SEQ ID NO: 10501 - RNA, 19 nt, Artificial Sequence
  Synthetic
cagcaagaacugaacuaaa

SEQ ID NO: 10502 - RNA, 19 nt, Artificial Sequence
  Synthetic
ggaauugacaagacagcaa

SEQ ID NO: 10503 - RNA, 19 nt, Artificial Sequence
  Synthetic
ugguggaacauuugggaaa

SEQ ID NO: 10504 - RNA, 19 nt, Artificial Sequence
  Synthetic
ugaacuaucuguuggagaa

SEQ ID NO: 10505 - RNA, 19 nt, Artificial Sequence
  Synthetic
guuagaagaaccagaagua

SEQ ID NO: 10506 - RNA, 19 nt, Artificial Sequence
  Synthetic
gugaaagagacacaggaaa

SEQ ID NO: 10507 - RNA, 19 nt, Artificial Sequence
  Synthetic
uuucagaguugguggaaca

SEQ ID NO: 10508 - RNA, 19 nt, Artificial Sequence
  Synthetic
cuucgaagcaucagcauaa

SEQ ID NO: 10509 - RNA, 19 nt, Artificial Sequence
  Synthetic
gggagugagaugaagaaau

SEQ ID NO: 10510 - RNA, 19 nt, Artificial Sequence
  Synthetic
cgauuauggaagugaguga

SEQ ID NO: 10511 - RNA, 19 nt, Artificial Sequence
  Synthetic
cuggauuuguggaggagaa

SEQ ID NO: 10512 - RNA, 19 nt, Artificial Sequence
  Synthetic
gaacaaugacuauaagaca

SEQ ID NO: 10513 - RNA, 19 nt, Artificial Sequence
  Synthetic
gaauucggauugauagaaa

SEQ ID NO: 10514 - RNA, 19 nt, Artificial Sequence
  Synthetic
gaaaggacauucagcucaa

SEQ ID NO: 10515 - RNA, 19 nt, Artificial Sequence
  Synthetic
cugcuuggcuacagaauua

SEQ ID NO: 10516 - RNA, 19 nt, Artificial Sequence
  Synthetic
augcagagccucagagcaa

SEQ ID NO: 10517 - RNA, 19 nt, Artificial Sequence
  Synthetic
uggaacacauauuggaauu

SEQ ID NO: 10518 - RNA, 19 nt, Artificial Sequence
  Synthetic
ccauuuaauuagcugcaua

SEQ ID NO: 10519 - RNA, 19 nt, Artificial Sequence
  Synthetic
cagaauuauugugaggaua

SEQ ID NO: 10520 - RNA, 19 nt, Artificial Sequence
  Synthetic
ucuucauuguccagaaaua

SEQ ID NO: 10521 - RNA, 19 nt, Artificial Sequence
  Synthetic
ucaucagccugguggacaa

SEQ ID NO: 10522 - RNA, 19 nt, Artificial Sequence
  Synthetic
cuacagacuuugagaaggu

SEQ ID NO: 10523 - RNA, 19 nt, Artificial Sequence
  Synthetic
uccaauauaggguggguaa

SEQ ID NO: 10524 - RNA, 19 nt, Artificial Sequence
  Synthetic
caucggagcaggugaagau

SEQ ID NO: 10525 - RNA, 19 nt, Artificial Sequence
  Synthetic
acagaauuauugugaggau

SEQ ID NO: 10526 - RNA, 19 nt, Artificial Sequence
  Synthetic
gcaaagauguggccaagca

SEQ ID NO: 10527 - RNA, 19 nt, Artificial Sequence
  Synthetic
ugaagaugcugcagcggau

SEQ ID NO: 10528 - RNA, 19 nt, Artificial Sequence
  Synthetic
gagcagaagauccgggugu

SEQ ID NO: 10529 - RNA, 19 nt, Artificial Sequence
  Synthetic
acaaaugugacccaggaua

SEQ ID NO: 10530 - RNA, 19 nt, Artificial Sequence
  Synthetic
ucagcaaagauguggccaa

SEQ ID NO: 10531 - RNA, 19 nt, Artificial Sequence
  Synthetic
ccgcugagcugaacugaca

SEQ ID NO: 10532 - RNA, 19 nt, Artificial Sequence
  Synthetic
ggucuucauuguccagaaa

SEQ ID NO: 10533 - RNA, 19 nt, Artificial Sequence
  Synthetic
guacagcacuuaacgcaau

SEQ ID NO: 10534 - RNA, 19 nt, Artificial Sequence
  Synthetic
gguccgaucuggaacacau

SEQ ID NO: 10535 - RNA, 19 nt, Artificial Sequence
  Synthetic
cagugaaccugccaaagaa

SEQ ID NO: 10536 - RNA, 19 nt, Artificial Sequence
  Synthetic
acaaguacccuaaggagga

SEQ ID NO: 10537 - RNA, 19 nt, Artificial Sequence
  Synthetic
gcagagccucagagcaaau

SEQ ID NO: 10538 - RNA, 19 nt, Artificial Sequence
  Synthetic
ugcaggaagcacugagauu

SEQ ID NO: 10539 - RNA, 19 nt, Artificial Sequence
  Synthetic
gcaccauccuauacuauga

SEQ ID NO: 10540 - RNA, 19 nt, Artificial Sequence
  Synthetic
aaggaggacucggagauaa

SEQ ID NO: 10541 - RNA, 19 nt, Artificial Sequence
  Synthetic
cuaaggaggacucggagau

SEQ ID NO: 10542 - RNA, 19 nt, Artificial Sequence
  Synthetic
uguccguggagguggagaa

SEQ ID NO: 10543 - RNA, 19 nt, Artificial Sequence
  Synthetic
acgugguguuugucagcaa

SEQ ID NO: 10544 - RNA, 19 nt, Artificial Sequence
  Synthetic
ccucagagcaaauaaaucu

SEQ ID NO: 10545 - RNA, 19 nt, Artificial Sequence
  Synthetic
ccugaaacuucgaaggaaa

SEQ ID NO: 10546 - RNA, 19 nt, Artificial Sequence
  Synthetic
ggacagaguugccgaacaa

SEQ ID NO: 10547 - RNA, 19 nt, Artificial Sequence
  Synthetic
ggaagaacgucuaaaggaa

SEQ ID NO: 10548 - RNA, 19 nt, Artificial Sequence
  Synthetic
cuagagaguuccuggauaa

SEQ ID NO: 10549 - RNA, 19 nt, Artificial Sequence
  Synthetic
gcaagaaauccaagaagaa

SEQ ID NO: 10550 - RNA, 19 nt, Artificial Sequence
  Synthetic
gaaagaaagucucgaaaga

SEQ ID NO: 10551 - RNA, 19 nt, Artificial Sequence
  Synthetic
gcgacaagcugaaggccaa

SEQ ID NO: 10552 - RNA, 19 nt, Artificial Sequence
  Synthetic
gggaacagguggugcauau

SEQ ID NO: 10553 - RNA, 19 nt, Artificial Sequence
  Synthetic
cgaaggaaaccucgggaaa

SEQ ID NO: 10554 - RNA, 19 nt, Artificial Sequence
  Synthetic
ccaaagaaggacaggguau

SEQ ID NO: 10555 - RNA, 19 nt, Artificial Sequence
  Synthetic
aggaagaagaugacacaaa

SEQ ID NO: 10556 - RNA, 19 nt, Artificial Sequence
  Synthetic
gcugacagauuuuggauua

SEQ ID NO: 10557 - RNA, 19 nt, Artificial Sequence
  Synthetic
cagcagaagagaaggaaga

SEQ ID NO: 10558 - RNA, 19 nt, Artificial Sequence
  Synthetic
gugaaaaguuagacagcaa

SEQ ID NO: 10559 - RNA, 19 nt, Artificial Sequence
  Synthetic
gagagugagaagagugaaa

SEQ ID NO: 10560 - RNA, 19 nt, Artificial Sequence
  Synthetic
ccaaggugguggugaagaa

SEQ ID NO: 10561 - RNA, 19 nt, Artificial Sequence
  Synthetic
gaacagucauggaaagcaa

SEQ ID NO: 10562 - RNA, 19 nt, Artificial Sequence
  Synthetic
gagaacagaugcaggaaca

SEQ ID NO: 10563 - RNA, 19 nt, Artificial Sequence
  Synthetic
aggccaaggugguggugaa

SEQ ID NO: 10564 - RNA, 19 nt, Artificial Sequence
  Synthetic
caacagagggagagcaaga

SEQ ID NO: 10565 - RNA, 19 nt, Artificial Sequence
  Synthetic
acugaaagcaacagacaua

SEQ ID NO: 10566 - RNA, 19 nt, Artificial Sequence
  Synthetic
aggaagacucuguggacaa

SEQ ID NO: 10567 - RNA, 19 nt, Artificial Sequence
  Synthetic
gcucaugaucguucagaaa

SEQ ID NO: 10568 - RNA, 19 nt, Artificial Sequence
  Synthetic
uggaagagagagagaagaa

SEQ ID NO: 10569 - RNA, 19 nt, Artificial Sequence
  Synthetic
ccaaggaaccugaaaggaa

SEQ ID NO: 10570 - RNA, 19 nt, Artificial Sequence
  Synthetic
gugagaaggagcugggcaa

SEQ ID NO: 10571 - RNA, 19 nt, Artificial Sequence
  Synthetic
cgaaagauccuaauuguua

SEQ ID NO: 10572 - RNA, 19 nt, Artificial Sequence
  Synthetic
gggaauaaggugucaauca

SEQ ID NO: 10573 - RNA, 19 nt, Artificial Sequence
  Synthetic
gggaagaacuacggcuuua

SEQ ID NO: 10574 - RNA, 19 nt, Artificial Sequence
  Synthetic
guggaaaggucaaguacuu

SEQ ID NO: 10575 - RNA, 19 nt, Artificial Sequence
  Synthetic
ggucaaagauuaaagguua

SEQ ID NO: 10576 - RNA, 19 nt, Artificial Sequence
  Synthetic
gcauacaucugcagggaaa

SEQ ID NO: 10577 - RNA, 19 nt, Artificial Sequence
  Synthetic
agaagaaggucaaagauua

SEQ ID NO: 10578 - RNA, 19 nt, Artificial Sequence
  Synthetic
cgacauacccagacugaua

SEQ ID NO: 10579 - RNA, 19 nt, Artificial Sequence
  Synthetic
caacagaacaauugaugaa

SEQ ID NO: 10580 - RNA, 19 nt, Artificial Sequence
  Synthetic
gaagaaggucaaagauuaa

SEQ ID NO: 10581 - RNA, 19 nt, Artificial Sequence
  Synthetic
gcaaacaauuggaagaaca

SEQ ID NO: 10582 - RNA, 19 nt, Artificial Sequence
  Synthetic
aagaagaggaggagaauga

SEQ ID NO: 10583 - RNA, 19 nt, Artificial Sequence
  Synthetic
cgagaaagcuauugagauc

SEQ ID NO: 10584 - RNA, 19 nt, Artificial Sequence
  Synthetic
caaugaagcaagaaagauu

SEQ ID NO: 10585 - RNA, 19 nt, Artificial Sequence
  Synthetic
ggaagaaaucaaacaagaa

SEQ ID NO: 10586 - RNA, 19 nt, Artificial Sequence
  Synthetic
ggaaugaguccuagugaga

SEQ ID NO: 10587 - RNA, 19 nt, Artificial Sequence
  Synthetic
gaauauaagcgcaaacaau

SEQ ID NO: 10588 - RNA, 19 nt, Artificial Sequence
  Synthetic
gaacauacgggcaaguuua

SEQ ID NO: 10589 - RNA, 19 nt, Artificial Sequence
  Synthetic
gagcagagacaguuagaga

SEQ ID NO: 10590 - RNA, 19 nt, Artificial Sequence
  Synthetic
gguuaaaguuucuauguga

SEQ ID NO: 10591 - RNA, 19 nt, Artificial Sequence
  Synthetic
aaagaaugcuguggaaaua

SEQ ID NO: 10592 - RNA, 19 nt, Artificial Sequence
  Synthetic
aagaauaagcuacgaguuu

SEQ ID NO: 10593 - RNA, 19 nt, Artificial Sequence
  Synthetic
ggcauuagccaaagaacua

SEQ ID NO: 10594 - RNA, 19 nt, Artificial Sequence
  Synthetic
gauggaaaguguugagaaa

SEQ ID NO: 10595 - RNA, 19 nt, Artificial Sequence
  Synthetic
caucaagacuuuuggagua

SEQ ID NO: 10596 - RNA, 19 nt, Artificial Sequence
  Synthetic
gcacuaugaugaagaauau

SEQ ID NO: 10597 - RNA, 19 nt, Artificial Sequence
  Synthetic
uggaaaguguugagaaaga

SEQ ID NO: 10598 - RNA, 19 nt, Artificial Sequence
  Synthetic
gcaagaaauugauuccaaa

SEQ ID NO: 10599 - RNA, 19 nt, Artificial Sequence
  Synthetic
ggagaagacuggaaaugau

SEQ ID NO: 10600 - RNA, 19 nt, Artificial Sequence
  Synthetic
cagcaagaauggccugaaa

SEQ ID NO: 10601 - RNA, 19 nt, Artificial Sequence
  Synthetic
gaggagagcagcuggauau

SEQ ID NO: 10602 - RNA, 19 nt, Artificial Sequence
  Synthetic
gaaauuucuuccagagaca

SEQ ID NO: 10603 - RNA, 19 nt, Artificial Sequence
  Synthetic
aagaaaagcuccuccaaaa

SEQ ID NO: 10604 - RNA, 19 nt, Artificial Sequence
  Synthetic
gggagaaacucauuaaaau

SEQ ID NO: 10605 - RNA, 19 nt, Artificial Sequence
  Synthetic
cugcaaagucaguggguua

SEQ ID NO: 10606 - RNA, 19 nt, Artificial Sequence
  Synthetic
ugaaggaaguggagacaua

SEQ ID NO: 10607 - RNA, 19 nt, Artificial Sequence
  Synthetic
gcacaaacguaaagcccaa

SEQ ID NO: 10608 - RNA, 19 nt, Artificial Sequence
  Synthetic
ggaguuggcuucaaagaaa

SEQ ID NO: 10609 - RNA, 19 nt, Artificial Sequence
  Synthetic
ggaaacagcuaaucaggaa

SEQ ID NO: 10610 - RNA, 19 nt, Artificial Sequence
  Synthetic
agaugaagcugaaacauua

SEQ ID NO: 10611 - RNA, 19 nt, Artificial Sequence
  Synthetic
cggcaaagcuaacaguaau

SEQ ID NO: 10612 - RNA, 19 nt, Artificial Sequence
  Synthetic
gcacaacacuccugauauu

SEQ ID NO: 10613 - RNA, 19 nt, Artificial Sequence
  Synthetic
ccucagauauuuuggaaga

SEQ ID NO: 10614 - RNA, 19 nt, Artificial Sequence
  Synthetic
gaguaaauggacugauuaa

SEQ ID NO: 10615 - RNA, 19 nt, Artificial Sequence
  Synthetic
ggaggagaaugaaggaaau

SEQ ID NO: 10616 - RNA, 19 nt, Artificial Sequence
  Synthetic
ccaaagaaggccaguagaa

SEQ ID NO: 10617 - RNA, 19 nt, Artificial Sequence
  Synthetic
aagaaaugcucaucugaaa

SEQ ID NO: 10618 - RNA, 19 nt, Artificial Sequence
  Synthetic
ccuagaugaugaugggaau

SEQ ID NO: 10619 - RNA, 19 nt, Artificial Sequence
  Synthetic
acaagaucuuugagggaau

SEQ ID NO: 10620 - RNA, 19 nt, Artificial Sequence
  Synthetic
cguucuagaucaagggaca

SEQ ID NO: 10621 - RNA, 19 nt, Artificial Sequence
  Synthetic
ugaaaagcguggugcaaaa

SEQ ID NO: 10622 - RNA, 19 nt, Artificial Sequence
  Synthetic
guaaaggcaucucgguaaa

SEQ ID NO: 10623 - RNA, 19 nt, Artificial Sequence
  Synthetic
gacaaagaauccaaguaaa

SEQ ID NO: 10624 - RNA, 19 nt, Artificial Sequence
  Synthetic
ugacaaagaauccaaguaa

SEQ ID NO: 10625 - RNA, 19 nt, Artificial Sequence
  Synthetic
gagcuaacauccauauuua

SEQ ID NO: 10626 - RNA, 19 nt, Artificial Sequence
  Synthetic
gcacaaaggaugcuguuau

SEQ ID NO: 10627 - RNA, 19 nt, Artificial Sequence
  Synthetic
ggugaacaacccugaguua

SEQ ID NO: 10628 - RNA, 19 nt, Artificial Sequence
  Synthetic
caagaaugaagcagggauu

SEQ ID NO: 10629 - RNA, 19 nt, Artificial Sequence
  Synthetic
ggaguagggaggagaauga

SEQ ID NO: 10630 - RNA, 19 nt, Artificial Sequence
  Synthetic
ccaagaaacagaagcccaa

SEQ ID NO: 10631 - RNA, 19 nt, Artificial Sequence
  Synthetic
gcuggcaacuagauggaaa

SEQ ID NO: 10632 - RNA, 19 nt, Artificial Sequence
  Synthetic
gagccaagaaguagcagaa

SEQ ID NO: 10633 - RNA, 19 nt, Artificial Sequence
  Synthetic
gaagaagagaugacaaaga

SEQ ID NO: 10634 - RNA, 19 nt, Artificial Sequence
  Synthetic
gagacugcaugguggcaua

SEQ ID NO: 10635 - RNA, 19 nt, Artificial Sequence
  Synthetic
gaaauaaacaggaaggaaa

SEQ ID NO: 10636 - RNA, 19 nt, Artificial Sequence
  Synthetic
ccaaauugcccuuguguuu

SEQ ID NO: 10637 - RNA, 19 nt, Artificial Sequence
  Synthetic
ggaaauaaacaggaaggaa

SEQ ID NO: 10638 - RNA, 19 nt, Artificial Sequence
  Synthetic
ccaaggaaauaaacaggaa

SEQ ID NO: 10639 - RNA, 19 nt, Artificial Sequence
  Synthetic
aguaagaguucaaguacau

SEQ ID NO: 10640 - RNA, 19 nt, Artificial Sequence
  Synthetic
caguaagaguucaaguaca

SEQ ID NO: 10641 - RNA, 19 nt, Artificial Sequence
  Synthetic
auagggaacugcauggaua

SEQ ID NO: 10642 - RNA, 19 nt, Artificial Sequence
  Synthetic
cagcagagagccugucaua

SEQ ID NO: 10643 - RNA, 19 nt, Artificial Sequence
  Synthetic
ugacagagcgccaggcuuu

SEQ ID NO: 10644 - RNA, 19 nt, Artificial Sequence
  Synthetic
gaccaagucaccaaggaaa

SEQ ID NO: 10645 - RNA, 19 nt, Artificial Sequence
  Synthetic
guaacaagaaacagagagu

SEQ ID NO: 10646 - RNA, 19 nt, Artificial Sequence
  Synthetic
ggagcaggcaggcguguaa

SEQ ID NO: 10647 - RNA, 19 nt, Artificial Sequence
  Synthetic
gcguguaacaagaaacaga

SEQ ID NO: 10648 - RNA, 19 nt, Artificial Sequence
  Synthetic
gugcagaggcucacagcuu

SEQ ID NO: 10649 - RNA, 19 nt, Artificial Sequence
  Synthetic
gcuuauguacagcuggaua

SEQ ID NO: 10650 - RNA, 19 nt, Artificial Sequence
  Synthetic
gauuguaaacccacaguau

SEQ ID NO: 10651 - RNA, 19 nt, Artificial Sequence
  Synthetic
caagacaguaagaguucaa

SEQ ID NO: 10652 - RNA, 19 nt, Artificial Sequence
  Synthetic
guguacagcuugggaauga

SEQ ID NO: 10653 - RNA, 19 nt, Artificial Sequence
  Synthetic
caguggagcugccggauca

SEQ ID NO: 10654 - RNA, 19 nt, Artificial Sequence
  Synthetic
cuagcagcguugugccaaa

SEQ ID NO: 10655 - RNA, 19 nt, Artificial Sequence
  Synthetic
aggcaggcguguaacaaga

SEQ ID NO: 10656 - RNA, 19 nt, Artificial Sequence
  Synthetic
agaacagcgacgaugcuua

SEQ ID NO: 10657 - RNA, 19 nt, Artificial Sequence
  Synthetic
uggauaacuugccaggaau

SEQ ID NO: 10658 - RNA, 19 nt, Artificial Sequence
  Synthetic
auguacagcuggauaacuu

SEQ ID NO: 10659 - RNA, 19 nt, Artificial Sequence
  Synthetic
gcgccaggcuuuaucuuau

SEQ ID NO: 10660 - RNA, 19 nt, Artificial Sequence
  Synthetic
gcaacagcagcaacagcaa

SEQ ID NO: 10661 - RNA, 19 nt, Artificial Sequence
  Synthetic
gacaguaagaguucaagua

SEQ ID NO: 10662 - RNA, 19 nt, Artificial Sequence
  Synthetic
gaacagcgacgaugcuuau

SEQ ID NO: 10663 - RNA, 19 nt, Artificial Sequence
  Synthetic
aaucagggcacaagaaugu

SEQ ID NO: 10664 - RNA, 19 nt, Artificial Sequence
  Synthetic
ccaagucaccaaggaaaua

SEQ ID NO: 10665 - RNA, 19 nt, Artificial Sequence
  Synthetic
gcacaaagcuguucugaaa

SEQ ID NO: 10666 - RNA, 19 nt, Artificial Sequence
  Synthetic
gcgaagagaacgagaacua

SEQ ID NO: 10667 - RNA, 19 nt, Artificial Sequence
  Synthetic
ggagaaacuuaucaagaaa

SEQ ID NO: 10668 - RNA, 19 nt, Artificial Sequence
  Synthetic
aggaagaagaagaggaaca

SEQ ID NO: 10669 - RNA, 19 nt, Artificial Sequence
  Synthetic
agacaaagaucuugaaacu

SEQ ID NO: 10670 - RNA, 19 nt, Artificial Sequence
  Synthetic
ccuaagaguuugaagucua

SEQ ID NO: 10671 - RNA, 19 nt, Artificial Sequence
  Synthetic
cugcagaaauggagaaacu

SEQ ID NO: 10672 - RNA, 19 nt, Artificial Sequence
  Synthetic
caguagaagcacaggaaga

SEQ ID NO: 10673 - RNA, 19 nt, Artificial Sequence
  Synthetic
ccaaguaucucgucacaaa

SEQ ID NO: 10674 - RNA, 19 nt, Artificial Sequence
  Synthetic
gaacaaaugucuggcuaua

SEQ ID NO: 10675 - RNA, 19 nt, Artificial Sequence
  Synthetic
acgucaagccagagagauu

SEQ ID NO: 10676 - RNA, 19 nt, Artificial Sequence
  Synthetic
ccauggagaaagaggcuaa

SEQ ID NO: 10677 - RNA, 19 nt, Artificial Sequence
  Synthetic
agccaaagcaguaguguua

SEQ ID NO: 10678 - RNA, 19 nt, Artificial Sequence
  Synthetic
aagcagaagaagaagcuaa

SEQ ID NO: 10679 - RNA, 19 nt, Artificial Sequence
  Synthetic
caguaagagagcuggacaa

SEQ ID NO: 10680 - RNA, 19 nt, Artificial Sequence
  Synthetic
uuucaaagcagaaggagaa

SEQ ID NO: 10681 - RNA, 19 nt, Artificial Sequence
  Synthetic
ccaaugaagugguggccau

SEQ ID NO: 10682 - RNA, 19 nt, Artificial Sequence
  Synthetic
ccagagagauugaagcuuu

SEQ ID NO: 10683 - RNA, 19 nt, Artificial Sequence
  Synthetic
gcagaaauggagaaacuua

SEQ ID NO: 10684 - RNA, 19 nt, Artificial Sequence
  Synthetic
gagcagggcaugagcagaa

SEQ ID NO: 10685 - RNA, 19 nt, Artificial Sequence
  Synthetic
aagaagagauguuggcuuu

SEQ ID NO: 10686 - RNA, 19 nt, Artificial Sequence
  Synthetic
gaucacagcauuaaugaaa

SEQ ID NO: 10687 - RNA, 19 nt, Artificial Sequence
  Synthetic
acugagaaauggcaggaua

SEQ ID NO: 10688 - RNA, 19 nt, Artificial Sequence
  Synthetic
aggacaauaugauggcaaa

SEQ ID NO: 10689 - RNA, 19 nt, Artificial Sequence
  Synthetic
caguaugaucacagcauua

SEQ ID NO: 10690 - RNA, 19 nt, Artificial Sequence
  Synthetic
cauuacaagaaguggaaau

SEQ ID NO: 10691 - RNA, 19 nt, Artificial Sequence
  Synthetic
caaagaagauccagagaag

SEQ ID NO: 10692 - RNA, 19 nt, Artificial Sequence
  Synthetic
ggugaaacuugcugacuuu

SEQ ID NO: 10693 - RNA, 19 nt, Artificial Sequence
  Synthetic
ucacuaaccagcuggaaua

SEQ ID NO: 10694 - RNA, 19 nt, Artificial Sequence
  Synthetic
acaacaugaucgagagcuu

SEQ ID NO: 10695 - RNA, 19 nt, Artificial Sequence
  Synthetic
cagacaaguucaaggacua

SEQ ID NO: 10696 - RNA, 19 nt, Artificial Sequence
  Synthetic
gcacaaagaccuucgcauu

SEQ ID NO: 10697 - RNA, 19 nt, Artificial Sequence
  Synthetic
acucagaauccgaggugaa

SEQ ID NO: 10698 - RNA, 19 nt, Artificial Sequence
  Synthetic
aauccgaggugaaggacua

SEQ ID NO: 10699 - RNA, 19 nt, Artificial Sequence
  Synthetic
cugcagugcccguggcuaa

SEQ ID NO: 10700 - RNA, 19 nt, Artificial Sequence
  Synthetic
cggaaggucuggagaagga

SEQ ID NO: 10701 - RNA, 19 nt, Artificial Sequence
  Synthetic
aggccgaggucaaggucua

SEQ ID NO: 10702 - RNA, 19 nt, Artificial Sequence
  Synthetic
agucagaggaggaggagca

SEQ ID NO: 10703 - RNA, 19 nt, Artificial Sequence
  Synthetic
guuuaugaucuucaggaaa

SEQ ID NO: 10704 - RNA, 19 nt, Artificial Sequence
  Synthetic
gcgaagacgccaaagacuu

SEQ ID NO: 10705 - RNA, 19 nt, Artificial Sequence
  Synthetic
ucucagaccuguacgauau

SEQ ID NO: 10706 - RNA, 19 nt, Artificial Sequence
  Synthetic
aggacuaccuagagaccau

SEQ ID NO: 10707 - RNA, 19 nt, Artificial Sequence
  Synthetic
ccgaauacaaccugcucaa

SEQ ID NO: 10708 - RNA, 19 nt, Artificial Sequence
  Synthetic
acacaauaucccuggacau

SEQ ID NO: 10709 - RNA, 19 nt, Artificial Sequence
  Synthetic
ccgagaucauccagcagaa

SEQ ID NO: 10710 - RNA, 19 nt, Artificial Sequence
  Synthetic
gagcgaagccuccgacauu

SEQ ID NO: 10711 - RNA, 19 nt, Artificial Sequence
  Synthetic
guguacaccugcagcguga

SEQ ID NO: 10712 - RNA, 19 nt, Artificial Sequence
  Synthetic
cagaggagucagaggaugu

SEQ ID NO: 10713 - RNA, 19 nt, Artificial Sequence
  Synthetic
aguuuaugaucuucaggaa

SEQ ID NO: 10714 - RNA, 19 nt, Artificial Sequence
  Synthetic
acauaaagcccucuaacau

SEQ ID NO: 10715 - RNA, 19 nt, Artificial Sequence
  Synthetic
cagaggaggaggagcagga

SEQ ID NO: 10716 - RNA, 19 nt, Artificial Sequence
  Synthetic
gaacaugacucuccgagca

SEQ ID NO: 10717 - RNA, 19 nt, Artificial Sequence
  Synthetic
agacugugguccugggcca

SEQ ID NO: 10718 - RNA, 19 nt, Artificial Sequence
  Synthetic
cauuaaaaucugcgacuuu

SEQ ID NO: 10719 - RNA, 19 nt, Artificial Sequence
  Synthetic
ggccggaaggucuggagaa

SEQ ID NO: 10720 - RNA, 19 nt, Artificial Sequence
  Synthetic
acgccaaagacuucaucaa

SEQ ID NO: 10721 - RNA, 19 nt, Artificial Sequence
  Synthetic
gguccgagaacaugaucau

SEQ ID NO: 10722 - RNA, 19 nt, Artificial Sequence
  Synthetic
aggaggaggagcaggagga

SEQ ID NO: 10723 - RNA, 19 nt, Artificial Sequence
  Synthetic
gggcugcgugagagaguga

SEQ ID NO: 10724 - RNA, 19 nt, Artificial Sequence
  Synthetic
cauucgaguuuaugaucuu

SEQ ID NO: 10725 - RNA, 19 nt, Artificial Sequence
  Synthetic
ggacagaggcccagaggau

SEQ ID NO: 10726 - RNA, 19 nt, Artificial Sequence
  Synthetic
caagaaagguugugagaac

SEQ ID NO: 10727 - RNA, 19 nt, Artificial Sequence
  Synthetic
gagaagugcaagagagaga

SEQ ID NO: 10728 - RNA, 19 nt, Artificial Sequence
  Synthetic
gagaagagaaggaggcaga

SEQ ID NO: 10729 - RNA, 19 nt, Artificial Sequence
  Synthetic
ggucggagauuuugugaau

SEQ ID NO: 10730 - RNA, 19 nt, Artificial Sequence
  Synthetic
uugugaauauggugggaaa

SEQ ID NO: 10731 - RNA, 19 nt, Artificial Sequence
  Synthetic
uauuuaagcucgagaauca

SEQ ID NO: 10732 - RNA, 19 nt, Artificial Sequence
  Synthetic
gcgagaagugcaagagaga

SEQ ID NO: 10733 - RNA, 19 nt, Artificial Sequence
  Synthetic
aaacagacauggaaaucua

SEQ ID NO: 10734 - RNA, 19 nt, Artificial Sequence
  Synthetic
gcaagagcauggacaagaa

SEQ ID NO: 10735 - RNA, 19 nt, Artificial Sequence
  Synthetic
gaucauggacuuaugcaaa

SEQ ID NO: 10736 - RNA, 19 nt, Artificial Sequence
  Synthetic
gaaaagaccucgggugaaa

SEQ ID NO: 10737 - RNA, 19 nt, Artificial Sequence
  Synthetic
cgagaaucacagagcggaa

SEQ ID NO: 10738 - RNA, 19 nt, Artificial Sequence
  Synthetic
caauguaugauguggagaa

SEQ ID NO: 10739 - RNA, 19 nt, Artificial Sequence
  Synthetic
ucggagauuuugugaauau

SEQ ID NO: 10740 - RNA, 19 nt, Artificial Sequence
  Synthetic
gggcaaagcgcacguucaa

SEQ ID NO: 10741 - RNA, 19 nt, Artificial Sequence
  Synthetic
gggcaaagaaccacugaca

SEQ ID NO: 10742 - RNA, 19 nt, Artificial Sequence
  Synthetic
gagcgaggacccagaagaa

SEQ ID NO: 10743 - RNA, 19 nt, Artificial Sequence
  Synthetic
ugaaauugcaugaagucua

SEQ ID NO: 10744 - RNA, 19 nt, Artificial Sequence
  Synthetic
ugaccaaccugcaaagcua

SEQ ID NO: 10745 - RNA, 19 nt, Artificial Sequence
  Synthetic
gcaaagaaccacugacacu

SEQ ID NO: 10746 - RNA, 19 nt, Artificial Sequence
  Synthetic
agaaggaggcagagaagga

SEQ ID NO: 10747 - RNA, 19 nt, Artificial Sequence
  Synthetic
agaaugaccgugugaggaa

SEQ ID NO: 10748 - RNA, 19 nt, Artificial Sequence
  Synthetic
ggagcaggcuguuuagcaa

SEQ ID NO: 10749 - RNA, 19 nt, Artificial Sequence
  Synthetic
gcaugaagucuacgaaaca

SEQ ID NO: 10750 - RNA, 19 nt, Artificial Sequence
  Synthetic
aguuguagucacagaaauu

SEQ ID NO: 10751 - RNA, 19 nt, Artificial Sequence
  Synthetic
gaaauuaucagaugcgaga

SEQ ID NO: 10752 - RNA, 19 nt, Artificial Sequence
  Synthetic
acgaaacagacauggaaau

SEQ ID NO: 10753 - RNA, 19 nt, Artificial Sequence
  Synthetic
cagaagagaacaagccaga

SEQ ID NO: 10754 - RNA, 19 nt, Artificial Sequence
  Synthetic
cgaaaugaggacaaaucua

SEQ ID NO: 10755 - RNA, 19 nt, Artificial Sequence
  Synthetic
ggaaagaugcucagagaga

SEQ ID NO: 10756 - RNA, 19 nt, Artificial Sequence
  Synthetic
aggagaagcccaagguaaa

SEQ ID NO: 10757 - RNA, 19 nt, Artificial Sequence
  Synthetic
ugauacaaauccagaguua

SEQ ID NO: 10758 - RNA, 19 nt, Artificial Sequence
  Synthetic
ugaucuaccucuugggaaa

SEQ ID NO: 10759 - RNA, 19 nt, Artificial Sequence
  Synthetic
agaagaaacgagagggaau

SEQ ID NO: 10760 - RNA, 19 nt, Artificial Sequence
  Synthetic
cgaauuaccuucagcacaa

SEQ ID NO: 10761 - RNA, 19 nt, Artificial Sequence
  Synthetic
uggcaagaauaaugugaua

SEQ ID NO: 10762 - RNA, 19 nt, Artificial Sequence
  Synthetic
ccaaggaagagaagaagaa

SEQ ID NO: 10763 - RNA, 19 nt, Artificial Sequence
  Synthetic
uauaugaacuggagaaaga

SEQ ID NO: 10764 - RNA, 19 nt, Artificial Sequence
  Synthetic
agaacagauugcaaagaaa

SEQ ID NO: 10765 - RNA, 19 nt, Artificial Sequence
  Synthetic
caggagaagcccaagguaa

SEQ ID NO: 10766 - RNA, 19 nt, Artificial Sequence
  Synthetic
aagaagaauuugaggaugu

SEQ ID NO: 10767 - RNA, 19 nt, Artificial Sequence
  Synthetic
ggaccaaauuccauucaaa

SEQ ID NO: 10768 - RNA, 19 nt, Artificial Sequence
  Synthetic
gaguugagaacaaaggaaa

SEQ ID NO: 10769 - RNA, 19 nt, Artificial Sequence
  Synthetic
aggaaguggucgugagcca

SEQ ID NO: 10770 - RNA, 19 nt, Artificial Sequence
  Synthetic
gguagaaugaggagcaaaa

SEQ ID NO: 10771 - RNA, 19 nt, Artificial Sequence
  Synthetic
uuugaugaguugagaacaa

SEQ ID NO: 10772 - RNA, 19 nt, Artificial Sequence
  Synthetic
cuucagauuuccagcacaa

SEQ ID NO: 10773 - RNA, 19 nt, Artificial Sequence
  Synthetic
cuauauaugaacuggagaa

SEQ ID NO: 10774 - RNA, 19 nt, Artificial Sequence
  Synthetic
uaaagaagaggaagggcaa

SEQ ID NO: 10775 - RNA, 19 nt, Artificial Sequence
  Synthetic
agauagaacagauugcaaa

SEQ ID NO: 10776 - RNA, 19 nt, Artificial Sequence
  Synthetic
ccucagagagcuucauaaa

SEQ ID NO: 10777 - RNA, 19 nt, Artificial Sequence
  Synthetic
gagagagaauccugcagaa

SEQ ID NO: 10778 - RNA, 19 nt, Artificial Sequence
  Synthetic
guaaagaagaggaagggca

SEQ ID NO: 10779 - RNA, 19 nt, Artificial Sequence
  Synthetic
gaagaagaaacgagaggga

SEQ ID NO: 10780 - RNA, 19 nt, Artificial Sequence
  Synthetic
acgaauagucugaguagau

SEQ ID NO: 10781 - RNA, 19 nt, Artificial Sequence
  Synthetic
cugaagaaccguugcccaa

SEQ ID NO: 10782 - RNA, 19 nt, Artificial Sequence
  Synthetic
gaacacagucuuucgacaa

SEQ ID NO: 10783 - RNA, 19 nt, Artificial Sequence
  Synthetic
gcagauggacagugaagau

SEQ ID NO: 10784 - RNA, 19 nt, Artificial Sequence
  Synthetic
uugccaagcucaugaaaga

SEQ ID NO: 10785 - RNA, 19 nt, Artificial Sequence
  Synthetic
ggacaaagaagaacaaaua

SEQ ID NO: 10786 - RNA, 19 nt, Artificial Sequence
  Synthetic
aaauauuccucgugcuaaa

SEQ ID NO: 10787 - RNA, 19 nt, Artificial Sequence
  Synthetic
ccauggaaguccugagcau

SEQ ID NO: 10788 - RNA, 19 nt, Artificial Sequence
  Synthetic
aaauaaggcccaaggaaca

SEQ ID NO: 10789 - RNA, 19 nt, Artificial Sequence
  Synthetic
ggacagacagggcugguua

SEQ ID NO: 10790 - RNA, 19 nt, Artificial Sequence
  Synthetic
ucuacgagaacaagaaaua

SEQ ID NO: 10791 - RNA, 19 nt, Artificial Sequence
  Synthetic
gcuucagggccgaguacaa

SEQ ID NO: 10792 - RNA, 19 nt, Artificial Sequence
  Synthetic
guaaauaaggcccaaggaa

SEQ ID NO: 10793 - RNA, 19 nt, Artificial Sequence
  Synthetic
gcagugaggaggagaacca

SEQ ID NO: 10794 - RNA, 19 nt, Artificial Sequence
  Synthetic
gaggagauguccagcuuga

SEQ ID NO: 10795 - RNA, 19 nt, Artificial Sequence
  Synthetic
ggagaagacgcugggcaaa

SEQ ID NO: 10796 - RNA, 19 nt, Artificial Sequence
  Synthetic
acaaauauuccucgugcua

SEQ ID NO: 10797 - RNA, 19 nt, Artificial Sequence
  Synthetic
guaaagaaggggagacuga

SEQ ID NO: 10798 - RNA, 19 nt, Artificial Sequence
  Synthetic
gcgggaaacacgagccaga

SEQ ID NO: 10799 - RNA, 19 nt, Artificial Sequence
  Synthetic
ccgacguccuagagagcau

SEQ ID NO: 10800 - RNA, 19 nt, Artificial Sequence
  Synthetic
uggacaaagaagaacaaau

SEQ ID NO: 10801 - RNA, 19 nt, Artificial Sequence
  Synthetic
agacagggcugguuaaacu

SEQ ID NO: 10802 - RNA, 19 nt, Artificial Sequence
  Synthetic
gaggaggagaaccaagaaa

SEQ ID NO: 10803 - RNA, 19 nt, Artificial Sequence
  Synthetic
cggagucggugcugaugaa

SEQ ID NO: 10804 - RNA, 19 nt, Artificial Sequence
  Synthetic
uggagcaaauucagaaaca

SEQ ID NO: 10805 - RNA, 19 nt, Artificial Sequence
  Synthetic
cgggagaagcugucggagu

SEQ ID NO: 10806 - RNA, 19 nt, Artificial Sequence
  Synthetic
gggagaagcugucggaguc

SEQ ID NO: 10807 - RNA, 19 nt, Artificial Sequence
  Synthetic
gagcaaauucagaaacauc

SEQ ID NO: 10808 - RNA, 19 nt, Artificial Sequence
  Synthetic
cgaaaguucuuccgccaga

SEQ ID NO: 10809 - RNA, 19 nt, Artificial Sequence
  Synthetic
gguucaagcgaguggugga

SEQ ID NO: 10810 - RNA, 19 nt, Artificial Sequence
  Synthetic
cggaaggaauucugguuuc

SEQ ID NO: 10811 - RNA, 19 nt, Artificial Sequence
  Synthetic
acgacgucuacgagaacaa

SEQ ID NO: 10812 - RNA, 19 nt, Artificial Sequence
  Synthetic
cagagaucccguagcguca

SEQ ID NO: 10813 - RNA, 19 nt, Artificial Sequence
  Synthetic
gggagaaggugcuggugaa

SEQ ID NO: 10814 - RNA, 19 nt, Artificial Sequence
  Synthetic
aagagaaagugcuggagaa

SEQ ID NO: 10815 - RNA, 19 nt, Artificial Sequence
  Synthetic
gcaacuacaaggaggacua

SEQ ID NO: 10816 - RNA, 19 nt, Artificial Sequence
  Synthetic
ggagaaagcgcuggagaau

SEQ ID NO: 10817 - RNA, 19 nt, Artificial Sequence
  Synthetic
gggugacagugcuggagaa

SEQ ID NO: 10818 - RNA, 19 nt, Artificial Sequence
  Synthetic
ggaacagcgagcagaucaa

SEQ ID NO: 10819 - RNA, 19 nt, Artificial Sequence
  Synthetic
gggaggaugugacaaggaa

SEQ ID NO: 10820 - RNA, 19 nt, Artificial Sequence
  Synthetic
ucgagugggcggaggauuu

SEQ ID NO: 10821 - RNA, 19 nt, Artificial Sequence
  Synthetic
ggugauccugggagagauu

SEQ ID NO: 10822 - RNA, 19 nt, Artificial Sequence
  Synthetic
agaaagugcuggagaaugg

SEQ ID NO: 10823 - RNA, 19 nt, Artificial Sequence
  Synthetic
gggaacagcgagcagauca

SEQ ID NO: 10824 - RNA, 19 nt, Artificial Sequence
  Synthetic
ggagaggccaccagagacu

SEQ ID NO: 10825 - RNA, 19 nt, Artificial Sequence
  Synthetic
ggaaugaaacugaaacaua

SEQ ID NO: 10826 - RNA, 19 nt, Artificial Sequence
  Synthetic
ccucaaaccacguaacaua

SEQ ID NO: 10827 - RNA, 19 nt, Artificial Sequence
  Synthetic
acauaugaaugcaggacua

SEQ ID NO: 10828 - RNA, 19 nt, Artificial Sequence
  Synthetic
ggacaagaccucucagcua

SEQ ID NO: 10829 - RNA, 19 nt, Artificial Sequence
  Synthetic
guguagauauaaugaggua

SEQ ID NO: 10830 - RNA, 19 nt, Artificial Sequence
  Synthetic
gauguacagugaagggaaa

SEQ ID NO: 10831 - RNA, 19 nt, Artificial Sequence
  Synthetic
acagaaacaucgugacuuu

SEQ ID NO: 10832 - RNA, 19 nt, Artificial Sequence
  Synthetic
uugagaaugaagaggaaua

SEQ ID NO: 10833 - RNA, 19 nt, Artificial Sequence
  Synthetic
cagaagaauuccugcugaa

SEQ ID NO: 10834 - RNA, 19 nt, Artificial Sequence
  Synthetic
gaagcaaggaugaauaaua

SEQ ID NO: 10835 - RNA, 19 nt, Artificial Sequence
  Synthetic
ccaguaaagcaguggugaa

SEQ ID NO: 10836 - RNA, 19 nt, Artificial Sequence
  Synthetic
agaauuagauguacaguga

SEQ ID NO: 10837 - RNA, 19 nt, Artificial Sequence
  Synthetic
agucuagccuggaguuaaa

SEQ ID NO: 10838 - RNA, 19 nt, Artificial Sequence
  Synthetic
ggacacaaguugauuacau

SEQ ID NO: 10839 - RNA, 19 nt, Artificial Sequence
  Synthetic
uggaacaguugcaggguca

SEQ ID NO: 10840 - RNA, 19 nt, Artificial Sequence
  Synthetic
ucucaggaauggaaggcaa

SEQ ID NO: 10841 - RNA, 19 nt, Artificial Sequence
  Synthetic
caaucaggauguaaaguau

SEQ ID NO: 10842 - RNA, 19 nt, Artificial Sequence
  Synthetic
gugcagagaaugaauguuu

SEQ ID NO: 10843 - RNA, 19 nt, Artificial Sequence
  Synthetic
gcagagaaugaauguuuua

SEQ ID NO: 10844 - RNA, 19 nt, Artificial Sequence
  Synthetic
gaaggauguuugaugggaa

SEQ ID NO: 10845 - RNA, 19 nt, Artificial Sequence
  Synthetic
uggaaauguucucaggaau

SEQ ID NO: 10846 - RNA, 19 nt, Artificial Sequence
  Synthetic
gaguaugaaugauuagaga

SEQ ID NO: 10847 - RNA, 19 nt, Artificial Sequence
  Synthetic
ugaagauguuguagaagau

SEQ ID NO: 10848 - RNA, 19 nt, Artificial Sequence
  Synthetic
augaagauguuguagaaga

SEQ ID NO: 10849 - RNA, 19 nt, Artificial Sequence
  Synthetic
guagauauaaugagguaga

SEQ ID NO: 10850 - RNA, 19 nt, Artificial Sequence
  Synthetic
cuggaaauguucucaggaa

SEQ ID NO: 10851 - RNA, 19 nt, Artificial Sequence
  Synthetic
auaaugagguagaaguaga

SEQ ID NO: 10852 - RNA, 19 nt, Artificial Sequence
  Synthetic
auccuuagcugaagacaaa

SEQ ID NO: 10853 - RNA, 19 nt, Artificial Sequence
  Synthetic
cugcagagugauacagaau

SEQ ID NO: 10854 - RNA, 19 nt, Artificial Sequence
  Synthetic
ggaguuaaauugagacuuc

SEQ ID NO: 10855 - RNA, 19 nt, Artificial Sequence
  Synthetic
agacuaaacuacaggagaa

SEQ ID NO: 10856 - RNA, 19 nt, Artificial Sequence
  Synthetic
ggagauaaauggaaacaau

SEQ ID NO: 10857 - RNA, 19 nt, Artificial Sequence
  Synthetic
gagaauaagcagaaugaau

SEQ ID NO: 10858 - RNA, 19 nt, Artificial Sequence
  Synthetic
gcucauacauagaaagaga

SEQ ID NO: 10859 - RNA, 19 nt, Artificial Sequence
  Synthetic
gagaauaggcucauacaua

SEQ ID NO: 10860 - RNA, 19 nt, Artificial Sequence
  Synthetic
guucagaguucuauagauu

SEQ ID NO: 10861 - RNA, 19 nt, Artificial Sequence
  Synthetic
ggaugaaacgaaugagaau

SEQ ID NO: 10862 - RNA, 19 nt, Artificial Sequence
  Synthetic
cuaaacuacaggagaaaua

SEQ ID NO: 10863 - RNA, 19 nt, Artificial Sequence
  Synthetic
ccuuggaaguaguagauaa

SEQ ID NO: 10864 - RNA, 19 nt, Artificial Sequence
  Synthetic
guucaaagcaggaagauca

SEQ ID NO: 10865 - RNA, 19 nt, Artificial Sequence
  Synthetic
gaaaagugguuguuaguua

SEQ ID NO: 10866 - RNA, 19 nt, Artificial Sequence
  Synthetic
ugacaaaguuacugauuca

SEQ ID NO: 10867 - RNA, 19 nt, Artificial Sequence
  Synthetic
ccagagacaucaagaauga

SEQ ID NO: 10868 - RNA, 19 nt, Artificial Sequence
  Synthetic
gcaggaagaucaugcagaa

SEQ ID NO: 10869 - RNA, 19 nt, Artificial Sequence
  Synthetic
caggcugaguuuugggaaa

SEQ ID NO: 10870 - RNA, 19 nt, Artificial Sequence
  Synthetic
cgaaugagaauaagcagaa

SEQ ID NO: 10871 - RNA, 19 nt, Artificial Sequence
  Synthetic
agucugagaaugaaaguaa

SEQ ID NO: 10872 - RNA, 19 nt, Artificial Sequence
  Synthetic
cugauaaaugggaagauua

SEQ ID NO: 10873 - RNA, 19 nt, Artificial Sequence
  Synthetic
guaacaacaaagagcaaau

SEQ ID NO: 10874 - RNA, 19 nt, Artificial Sequence
  Synthetic
ggaagguuguugaggagau

SEQ ID NO: 10875 - RNA, 19 nt, Artificial Sequence
  Synthetic
guauguguguagacaaaua

SEQ ID NO: 10876 - RNA, 19 nt, Artificial Sequence
  Synthetic
cgaguuggcccuagacuua

SEQ ID NO: 10877 - RNA, 19 nt, Artificial Sequence
  Synthetic
cuuacaacgaugugggcaa

SEQ ID NO: 10878 - RNA, 19 nt, Artificial Sequence
  Synthetic
gagucuuccugcagcgaua

SEQ ID NO: 10879 - RNA, 19 nt, Artificial Sequence
  Synthetic
uuggaaagcuagugguuca

SEQ ID NO: 10880 - RNA, 19 nt, Artificial Sequence
  Synthetic
cuuggaaguaguagauaaa

SEQ ID NO: 10881 - RNA, 19 nt, Artificial Sequence
  Synthetic
agaccaacauucaagcaaa

SEQ ID NO: 10882 - RNA, 19 nt, Artificial Sequence
  Synthetic
caagcaaauuguucagcua

SEQ ID NO: 10883 - RNA, 19 nt, Artificial Sequence
  Synthetic
agguaacaacaaagagcaa

SEQ ID NO: 10884 - RNA, 19 nt, Artificial Sequence
  Synthetic
uugaggagauaaauggaaa

SEQ ID NO: 10885 - RNA, 19 nt, Artificial Sequence
  Synthetic
cgaagaaggugguggcuuu

SEQ ID NO: 10886 - RNA, 19 nt, Artificial Sequence
  Synthetic
guucaagaauugucagaaa

SEQ ID NO: 10887 - RNA, 19 nt, Artificial Sequence
  Synthetic
ggaagaauccagaggugaa

SEQ ID NO: 10888 - RNA, 19 nt, Artificial Sequence
  Synthetic
ggaaauggcugguuuggaa

SEQ ID NO: 10889 - RNA, 19 nt, Artificial Sequence
  Synthetic
ggaauuaaacggaguucaa

SEQ ID NO: 10890 - RNA, 19 nt, Artificial Sequence
  Synthetic
gcaaagaacacauaaauga

SEQ ID NO: 10891 - RNA, 19 nt, Artificial Sequence
  Synthetic
gcagguacaaggaggauua

SEQ ID NO: 10892 - RNA, 19 nt, Artificial Sequence
  Synthetic
cauaaaugaucuucagaca

SEQ ID NO: 10893 - RNA, 19 nt, Artificial Sequence
  Synthetic
gcacaaagggugacgauac

SEQ ID NO: 10894 - RNA, 19 nt, Artificial Sequence
  Synthetic
gguacaaggaggauuauau

SEQ ID NO: 10895 - RNA, 19 nt, Artificial Sequence
  Synthetic
agugggagauuacggaaua

SEQ ID NO: 10896 - RNA, 19 nt, Artificial Sequence
  Synthetic
gcagaucagacuaaguaua

SEQ ID NO: 10897 - RNA, 19 nt, Artificial Sequence
  Synthetic
uuagaaacgucauguagaa

SEQ ID NO: 10898 - RNA, 19 nt, Artificial Sequence
  Synthetic
ucacaaccgacauggauaa

SEQ ID NO: 10899 - RNA, 19 nt, Artificial Sequence
  Synthetic
ggaggauuauauugaaaca

SEQ ID NO: 10900 - RNA, 19 nt, Artificial Sequence
  Synthetic
ccuccuaccuccuucgaaa

SEQ ID NO: 10901 - RNA, 19 nt, Artificial Sequence
  Synthetic
ggaccgagguuuggcagaa

SEQ ID NO: 10902 - RNA, 19 nt, Artificial Sequence
  Synthetic
gcagaaaguuuaaaggaaa

SEQ ID NO: 10903 - RNA, 19 nt, Artificial Sequence
  Synthetic
agaaagaggugaugaacua

SEQ ID NO: 10904 - RNA, 19 nt, Artificial Sequence
  Synthetic
caacaaauguaccaaagaa

SEQ ID NO: 10905 - RNA, 19 nt, Artificial Sequence
  Synthetic
cagaagacgaugaggacga

SEQ ID NO: 10906 - RNA, 19 nt, Artificial Sequence
  Synthetic
ucaagaaagaggugaugaa

SEQ ID NO: 10907 - RNA, 19 nt, Artificial Sequence
  Synthetic
ucaucaagggcaugggaua

SEQ ID NO: 10908 - RNA, 19 nt, Artificial Sequence
  Synthetic
cagaugguacggagggaua

SEQ ID NO: 10909 - RNA, 19 nt, Artificial Sequence
  Synthetic
caucauagacagcaguuua

SEQ ID NO: 10910 - RNA, 19 nt, Artificial Sequence
  Synthetic
ccgggaaggacgaggauca

SEQ ID NO: 10911 - RNA, 19 nt, Artificial Sequence
  Synthetic
gagacuggcccuugaagaa

SEQ ID NO: 10912 - RNA, 19 nt, Artificial Sequence
  Synthetic
gggaaggaaugaagcgugu

SEQ ID NO: 10913 - RNA, 19 nt, Artificial Sequence
  Synthetic
gaaccaggcugcagaggca

SEQ ID NO: 10914 - RNA, 19 nt, Artificial Sequence
  Synthetic
ccuuauugcagaaaguuua

SEQ ID NO: 10915 - RNA, 19 nt, Artificial Sequence
  Synthetic
ggagugaagugcaagcauu

SEQ ID NO: 10916 - RNA, 19 nt, Artificial Sequence
  Synthetic
ugcagaaaguuuaaaggaa

SEQ ID NO: 10917 - RNA, 19 nt, Artificial Sequence
  Synthetic
agucagaggcagaagacga

SEQ ID NO: 10918 - RNA, 19 nt, Artificial Sequence
  Synthetic
gggaaggaagucagugaga

SEQ ID NO: 10919 - RNA, 19 nt, Artificial Sequence
  Synthetic
ggaaaguggcucagggccu

SEQ ID NO: 10920 - RNA, 19 nt, Artificial Sequence
  Synthetic
ugacauuaacagcagcaaa

SEQ ID NO: 10921 - RNA, 19 nt, Artificial Sequence
  Synthetic
uggacaugcuggagaaacu

SEQ ID NO: 10922 - RNA, 19 nt, Artificial Sequence
  Synthetic
ccaguaauccaaagaugua

SEQ ID NO: 10923 - RNA, 19 nt, Artificial Sequence
  Synthetic
gaaggaagucagugagauc

SEQ ID NO: 10924 - RNA, 19 nt, Artificial Sequence
  Synthetic
aggacgagguggacgacuu

SEQ ID NO: 10925 - RNA, 19 nt, Artificial Sequence
  Synthetic
ugauggacaugcuggagaa

SEQ ID NO: 10926 - RNA, 19 nt, Artificial Sequence
  Synthetic
aucaacaagacgaggcaaa

SEQ ID NO: 10927 - RNA, 19 nt, Artificial Sequence
  Synthetic
ccaaagcacugacaaagaa

SEQ ID NO: 10928 - RNA, 19 nt, Artificial Sequence
  Synthetic
aggcagaagacgaugagga

SEQ ID NO: 10929 - RNA, 19 nt, Artificial Sequence
  Synthetic
ugguaugagcugcaagcaa

SEQ ID NO: 10930 - RNA, 19 nt, Artificial Sequence
  Synthetic
caucaagggcaugggauau

SEQ ID NO: 10931 - RNA, 19 nt, Artificial Sequence
  Synthetic
ggaagucagcugaguugua

SEQ ID NO: 10932 - RNA, 19 nt, Artificial Sequence
  Synthetic
gcagauugcucaagaaauu

SEQ ID NO: 10933 - RNA, 19 nt, Artificial Sequence
  Synthetic
gcgagacuguggagaaaua

SEQ ID NO: 10934 - RNA, 19 nt, Artificial Sequence
  Synthetic
gaacaagaagagagaccua

SEQ ID NO: 10935 - RNA, 19 nt, Artificial Sequence
  Synthetic
ggaagaagaacaagcugaa

SEQ ID NO: 10936 - RNA, 19 nt, Artificial Sequence
  Synthetic
agaaacugccaaagcgaaa

SEQ ID NO: 10937 - RNA, 19 nt, Artificial Sequence
  Synthetic
ccgacacagaggaggauaa

SEQ ID NO: 10938 - RNA, 19 nt, Artificial Sequence
  Synthetic
acaaggaccucaagucaaa

SEQ ID NO: 10939 - RNA, 19 nt, Artificial Sequence
  Synthetic
ccaugaggaagaagaacaa

SEQ ID NO: 10940 - RNA, 19 nt, Artificial Sequence
  Synthetic
aagaaauugugaagggcau

SEQ ID NO: 10941 - RNA, 19 nt, Artificial Sequence
  Synthetic
aagccaagaagaagagcaa

SEQ ID NO: 10942 - RNA, 19 nt, Artificial Sequence
  Synthetic
ucaccaagcucauggacau

SEQ ID NO: 10943 - RNA, 19 nt, Artificial Sequence
  Synthetic
gugcgagacuguggagaaa

SEQ ID NO: 10944 - RNA, 19 nt, Artificial Sequence
  Synthetic
gaaaagaaaucucggacau

SEQ ID NO: 10945 - RNA, 19 nt, Artificial Sequence
  Synthetic
caacaaaugcaccaaagaa

SEQ ID NO: 10946 - RNA, 19 nt, Artificial Sequence
  Synthetic
aggaugacuucgaggagau

SEQ ID NO: 10947 - RNA, 19 nt, Artificial Sequence
  Synthetic
cgcccaaagccaagaagaa

SEQ ID NO: 10948 - RNA, 19 nt, Artificial Sequence
  Synthetic
aguuaaagugccacaacaa

SEQ ID NO: 10949 - RNA, 19 nt, Artificial Sequence
  Synthetic
ugauugacauugagaggga

SEQ ID NO: 10950 - RNA, 19 nt, Artificial Sequence
  Synthetic
gcuccuucuuugugggaca

SEQ ID NO: 10951 - RNA, 19 nt, Artificial Sequence
  Synthetic
ugaugaggccgaagaguca

SEQ ID NO: 10952 - RNA, 19 nt, Artificial Sequence
  Synthetic
ggaaggaaauccauuacuu

SEQ ID NO: 10953 - RNA, 19 nt, Artificial Sequence
  Synthetic
aggcagauugcucaagaaa

SEQ ID NO: 10954 - RNA, 19 nt, Artificial Sequence
  Synthetic
cugcugggccuuugaacaa

SEQ ID NO: 10955 - RNA, 19 nt, Artificial Sequence
  Synthetic
ucggcgagcucauuggaaa

SEQ ID NO: 10956 - RNA, 19 nt, Artificial Sequence
  Synthetic
agaagaagccuuugaaaua

SEQ ID NO: 10957 - RNA, 19 nt, Artificial Sequence
  Synthetic
ucaaagagacacaggaaua

SEQ ID NO: 10958 - RNA, 19 nt, Artificial Sequence
  Synthetic
guacgaagcagcagaguua

SEQ ID NO: 10959 - RNA, 19 nt, Artificial Sequence
  Synthetic
ggagaagaaauuagugaaa

SEQ ID NO: 10960 - RNA, 19 nt, Artificial Sequence
  Synthetic
auacaaagccacagaauau

SEQ ID NO: 10961 - RNA, 19 nt, Artificial Sequence
  Synthetic
ggaaagaugaggaaagaga

SEQ ID NO: 10962 - RNA, 19 nt, Artificial Sequence
  Synthetic
ccacaauacuacugauuuu

SEQ ID NO: 10963 - RNA, 19 nt, Artificial Sequence
  Synthetic
gaaaagcacucuugagaaa

SEQ ID NO: 10964 - RNA, 19 nt, Artificial Sequence
  Synthetic
cugaggagcuagagaauga

SEQ ID NO: 10965 - RNA, 19 nt, Artificial Sequence
  Synthetic
gcugggaggaagugaauua

SEQ ID NO: 10966 - RNA, 19 nt, Artificial Sequence
  Synthetic
cggaagaggacaagagcga

SEQ ID NO: 10967 - RNA, 19 nt, Artificial Sequence
  Synthetic
aaacaaaccugaaggaugu

SEQ ID NO: 10968 - RNA, 19 nt, Artificial Sequence
  Synthetic
gugaaguauuugaaaguga

SEQ ID NO: 10969 - RNA, 19 nt, Artificial Sequence
  Synthetic
ggacaagacaauaaaggga

SEQ ID NO: 10970 - RNA, 19 nt, Artificial Sequence
  Synthetic
guaagaauguucagaggga

SEQ ID NO: 10971 - RNA, 19 nt, Artificial Sequence
  Synthetic
gaaagagcagggagaagaa

SEQ ID NO: 10972 - RNA, 19 nt, Artificial Sequence
  Synthetic
cgggaaagaugaggaaaga

SEQ ID NO: 10973 - RNA, 19 nt, Artificial Sequence
  Synthetic
aagaagaagccuuugaaau

SEQ ID NO: 10974 - RNA, 19 nt, Artificial Sequence
  Synthetic
cagaauauggcuuggccua

SEQ ID NO: 10975 - RNA, 19 nt, Artificial Sequence
  Synthetic
gcaaagaacaucuggugga

SEQ ID NO: 10976 - RNA, 19 nt, Artificial Sequence
  Synthetic
gcaagaacgauuaugaaaa

SEQ ID NO: 10977 - RNA, 19 nt, Artificial Sequence
  Synthetic
ggaaagacuauaaggagca

SEQ ID NO: 10978 - RNA, 19 nt, Artificial Sequence
  Synthetic
cagaaaagagccuggcaaa

SEQ ID NO: 10979 - RNA, 19 nt, Artificial Sequence
  Synthetic
acauagugcucuuuuguua

SEQ ID NO: 10980 - RNA, 19 nt, Artificial Sequence
  Synthetic
ggaaagagcagggagaaga

SEQ ID NO: 10981 - RNA, 19 nt, Artificial Sequence
  Synthetic
ggggagguauguugggaaa

SEQ ID NO: 10982 - RNA, 19 nt, Artificial Sequence
  Synthetic
gggagaagaaauuagugaa

SEQ ID NO: 10983 - RNA, 19 nt, Artificial Sequence
  Synthetic
aaacauagauacugugagu

SEQ ID NO: 10984 - RNA, 19 nt, Artificial Sequence
  Synthetic
aggagaaacuggacccauu

SEQ ID NO: 10985 - RNA, 19 nt, Artificial Sequence
  Synthetic
ugaaagugauuguggaaac

SEQ ID NO: 10986 - RNA, 19 nt, Artificial Sequence
  Synthetic
gauaaagacacuaggaaua

SEQ ID NO: 10987 - RNA, 19 nt, Artificial Sequence
  Synthetic
ccagaaggauauagacaaa

SEQ ID NO: 10988 - RNA, 19 nt, Artificial Sequence
  Synthetic
gcacaaacaccauuagaaa

SEQ ID NO: 10989 - RNA, 19 nt, Artificial Sequence
  Synthetic
cggcaaauguuacaagaaa

SEQ ID NO: 10990 - RNA, 19 nt, Artificial Sequence
  Synthetic
gggcauggcaagagggcua

SEQ ID NO: 10991 - RNA, 19 nt, Artificial Sequence
  Synthetic
gcagaaugguacuggacaa

SEQ ID NO: 10992 - RNA, 19 nt, Artificial Sequence
  Synthetic
gagcauaacaugaguaaaa

SEQ ID NO: 10993 - RNA, 19 nt, Artificial Sequence
  Synthetic
caacagaaguauagaagca

SEQ ID NO: 10994 - RNA, 19 nt, Artificial Sequence
  Synthetic
gugaaaagccagaaggaua

SEQ ID NO: 10995 - RNA, 19 nt, Artificial Sequence
  Synthetic
gaauggugcugaugaaaua

SEQ ID NO: 10996 - RNA, 19 nt, Artificial Sequence
  Synthetic
cauaaagccuugcaggaaa

SEQ ID NO: 10997 - RNA, 19 nt, Artificial Sequence
  Synthetic
caagaaagaugaagagcga

SEQ ID NO: 10998 - RNA, 19 nt, Artificial Sequence
  Synthetic
ccaaggaagaugagaguga

SEQ ID NO: 10999 - RNA, 19 nt, Artificial Sequence
  Synthetic
aaacagagcuggaaagguu

SEQ ID NO: 11000 - RNA, 19 nt, Artificial Sequence
  Synthetic
gaaccaaacucucaaacaa

SEQ ID NO: 11001 - RNA, 19 nt, Artificial Sequence
  Synthetic
uauacaagcucuucagaaa

SEQ ID NO: 11002 - RNA, 19 nt, Artificial Sequence
  Synthetic
gaugaagagcgaagggaau

SEQ ID NO: 11003 - RNA, 19 nt, Artificial Sequence
  Synthetic
ggaacaaagcugccauaaa

SEQ ID NO: 11004 - RNA, 19 nt, Artificial Sequence
  Synthetic
gaacaaagcugccauaaau

SEQ ID NO: 11005 - RNA, 19 nt, Artificial Sequence
  Synthetic
guuaaggcugagagagaua

SEQ ID NO: 11006 - RNA, 19 nt, Artificial Sequence
  Synthetic
augcagaguucuagcaaau

SEQ ID NO: 11007 - RNA, 19 nt, Artificial Sequence
  Synthetic
caaauaugacagagcuaua

SEQ ID NO: 11008 - RNA, 19 nt, Artificial Sequence
  Synthetic
gaagaaagcucuggaucua

SEQ ID NO: 11009 - RNA, 19 nt, Artificial Sequence
  Synthetic
caagaauggugcugaugaa

SEQ ID NO: 11010 - RNA, 19 nt, Artificial Sequence
  Synthetic
ccaaacagaaauagucaua

SEQ ID NO: 11011 - RNA, 19 nt, Artificial Sequence
  Synthetic
agauaaagacacuaggaau

SEQ ID NO: 11012 - RNA, 19 nt, Artificial Sequence
  Synthetic
ccucaaguaaggaguguua

SEQ ID NO: 11013 - RNA, 19 nt, Artificial Sequence
  Synthetic
uugaaauguuggugggaca

SEQ ID NO: 11014 - RNA, 19 nt, Artificial Sequence
  Synthetic
cagcaugaaaccagggaau

SEQ ID NO: 11015 - RNA, 19 nt, Artificial Sequence
  Synthetic
auguuaaggcugagagaga

SEQ ID NO: 11016 - RNA, 19 nt, Artificial Sequence
  Synthetic
cagaaagccuugagggaaa

SEQ ID NO: 11017 - RNA, 19 nt, Artificial Sequence
  Synthetic
ggacaaaggcggaaaggau

SEQ ID NO: 11018 - RNA, 19 nt, Artificial Sequence
  Synthetic
gaagaacauugaugagaaa

SEQ ID NO: 11019 - RNA, 19 nt, Artificial Sequence
  Synthetic
caugaagacccuaaggaaa

SEQ ID NO: 11020 - RNA, 19 nt, Artificial Sequence
  Synthetic
gagacgaagagaagagaga

SEQ ID NO: 11021 - RNA, 19 nt, Artificial Sequence
  Synthetic
ccacagaaacccagcugaa

SEQ ID NO: 11022 - RNA, 19 nt, Artificial Sequence
  Synthetic
ugaagaacauugaugagaa

SEQ ID NO: 11023 - RNA, 19 nt, Artificial Sequence
  Synthetic
gcagcaagucggagcagua

SEQ ID NO: 11024 - RNA, 19 nt, Artificial Sequence
  Synthetic
gcaccuacucccacagaaa

SEQ ID NO: 11025 - RNA, 19 nt, Artificial Sequence
  Synthetic
guucggaccuuaucagaaa

SEQ ID NO: 11026 - RNA, 19 nt, Artificial Sequence
  Synthetic
acaaaggcggaaaggauaa

SEQ ID NO: 11027 - RNA, 19 nt, Artificial Sequence
  Synthetic
gacaaaggcggaaaggaua

SEQ ID NO: 11028 - RNA, 19 nt, Artificial Sequence
  Synthetic
guggaguguuggagugauu

SEQ ID NO: 11029 - RNA, 19 nt, Artificial Sequence
  Synthetic
ugauagaucuggaugguca

SEQ ID NO: 11030 - RNA, 19 nt, Artificial Sequence
  Synthetic
cgaagagaagagagaguca

SEQ ID NO: 11031 - RNA, 19 nt, Artificial Sequence
  Synthetic
uaaauuaguccgucgauua

SEQ ID NO: 11032 - RNA, 19 nt, Artificial Sequence
  Synthetic
ggaagauccucuaccagaa

SEQ ID NO: 11033 - RNA, 19 nt, Artificial Sequence
  Synthetic
ggcaaaugcugcaggaacu

SEQ ID NO: 11034 - RNA, 19 nt, Artificial Sequence
  Synthetic
cagaaagagucuaauuaca

SEQ ID NO: 11035 - RNA, 19 nt, Artificial Sequence
  Synthetic
augaagacccuaaggaaaa

SEQ ID NO: 11036 - RNA, 19 nt, Artificial Sequence
  Synthetic
cagcagagacgaagagaag

SEQ ID NO: 11037 - RNA, 19 nt, Artificial Sequence
  Synthetic
ccaugaagacccuaaggaa

SEQ ID NO: 11038 - RNA, 19 nt, Artificial Sequence
  Synthetic
gaucggugccuuuggagaa

SEQ ID NO: 11039 - RNA, 19 nt, Artificial Sequence
  Synthetic
ccuugagggaaaucagaua

SEQ ID NO: 11040 - RNA, 19 nt, Artificial Sequence
  Synthetic
acgucaaggccgagaggga

SEQ ID NO: 11041 - RNA, 19 nt, Artificial Sequence
  Synthetic
acaaugaguggguggucaa

SEQ ID NO: 11042 - RNA, 19 nt, Artificial Sequence
  Synthetic
ccuaccagcagaagguuaa

SEQ ID NO: 11043 - RNA, 19 nt, Artificial Sequence
  Synthetic
gcagaagugaaccggcaaa

SEQ ID NO: 11044 - RNA, 19 nt, Artificial Sequence
  Synthetic
cuauguuugucaagaucaa

SEQ ID NO: 11045 - RNA, 19 nt, Artificial Sequence
  Synthetic
agucacgcaucaagagcua

SEQ ID NO: 11046 - RNA, 19 nt, Artificial Sequence
  Synthetic
gaagaugacuggauggaaa

SEQ ID NO: 11047 - RNA, 19 nt, Artificial Sequence
  Synthetic
agggagagguggugaaaca

SEQ ID NO: 11048 - RNA, 19 nt, Artificial Sequence
  Synthetic
acacgaagguggcggugaa

SEQ ID NO: 11049 - RNA, 19 nt, Artificial Sequence
  Synthetic
gagagguggugaaacauua

SEQ ID NO: 11050 - RNA, 19 nt, Artificial Sequence
  Synthetic
ucaacaaacuccuggacau

SEQ ID NO: 11051 - RNA, 19 nt, Artificial Sequence
  Synthetic
gcagugugcuggaggacuu

SEQ ID NO: 11052 - RNA, 19 nt, Artificial Sequence
  Synthetic
gggccaaguuucccauuaa

SEQ ID NO: 11053 - RNA, 19 nt, Artificial Sequence
  Synthetic
ccuucaauuuuguggccaa

SEQ ID NO: 11054 - RNA, 19 nt, Artificial Sequence
  Synthetic
caucaggaguucaauaaau

SEQ ID NO: 11055 - RNA, 19 nt, Artificial Sequence
  Synthetic
ccugagaccaccagagaga

SEQ ID NO: 11056 - RNA, 19 nt, Artificial Sequence
  Synthetic
gcacacaucaggaguucaa

SEQ ID NO: 11057 - RNA, 19 nt, Artificial Sequence
  Synthetic
gaaugggagucuaguggau

SEQ ID NO: 11058 - RNA, 19 nt, Artificial Sequence
  Synthetic
ggacauggcagcccaaauu

SEQ ID NO: 11059 - RNA, 19 nt, Artificial Sequence
  Synthetic
gggagaagccugggauuga

SEQ ID NO: 11060 - RNA, 19 nt, Artificial Sequence
  Synthetic
ucacugaauacauggagaa

SEQ ID NO: 11061 - RNA, 19 nt, Artificial Sequence
  Synthetic
ccacagagggccaguacca

SEQ ID NO: 11062 - RNA, 19 nt, Artificial Sequence
  Synthetic
cgccagaagccauuaacua

SEQ ID NO: 11063 - RNA, 19 nt, Artificial Sequence
  Synthetic
gcucacacccggaagauga

SEQ ID NO: 11064 - RNA, 19 nt, Artificial Sequence
  Synthetic
gcacgcugcucauccgaaa

SEQ ID NO: 11065 - RNA, 19 nt, Artificial Sequence
  Synthetic
aggccaaccucaugaagca

SEQ ID NO: 11066 - RNA, 19 nt, Artificial Sequence
  Synthetic
ugaccaacccggaggugau

SEQ ID NO: 11067 - RNA, 19 nt, Artificial Sequence
  Synthetic
ccaacauucuggugucuga

SEQ ID NO: 11068 - RNA, 19 nt, Artificial Sequence
  Synthetic
cgacggagaucugggcuuu

SEQ ID NO: 11069 - RNA, 19 nt, Artificial Sequence
  Synthetic
cugaauacauggagaaugg

SEQ ID NO: 11070 - RNA, 19 nt, Artificial Sequence
  Synthetic
ccaaauugcagaaggcaug

SEQ ID NO: 11071 - RNA, 19 nt, Artificial Sequence
  Synthetic
ggacagcgccagaagccau

SEQ ID NO: 11072 - RNA, 19 nt, Artificial Sequence
  Synthetic
auugaagagcggaauuaua

SEQ ID NO: 11073 - RNA, 19 nt, Artificial Sequence
  Synthetic
acacaucaggaguucaaua

SEQ ID NO: 11074 - RNA, 19 nt, Artificial Sequence
  Synthetic
ggccaggacuuuaucuaau

SEQ ID NO: 11075 - RNA, 19 nt, Artificial Sequence
  Synthetic
ucacauggccuaugcacau

SEQ ID NO: 11076 - RNA, 19 nt, Artificial Sequence
  Synthetic
gggaagaacguaugggaga

SEQ ID NO: 11077 - RNA, 19 nt, Artificial Sequence
  Synthetic
ccauggagccagagaguga

SEQ ID NO: 11078 - RNA, 19 nt, Artificial Sequence
  Synthetic
gagcaugacccucacgaua

SEQ ID NO: 11079 - RNA, 19 nt, Artificial Sequence
  Synthetic
gcaucuaggaaguauuaaa

SEQ ID NO: 11080 - RNA, 19 nt, Artificial Sequence
  Synthetic
ucaagaagccagaccgcaa

SEQ ID NO: 11081 - RNA, 19 nt, Artificial Sequence
  Synthetic
gugaggugauggugaugaa

SEQ ID NO: 11082 - RNA, 19 nt, Artificial Sequence
  Synthetic
ucaaggaggugaaggucau

SEQ ID NO: 11083 - RNA, 19 nt, Artificial Sequence
  Synthetic
agaauguggugguggcuga

SEQ ID NO: 11084 - RNA, 19 nt, Artificial Sequence
  Synthetic
gggcagaggccaaguucca

SEQ ID NO: 11085 - RNA, 19 nt, Artificial Sequence
  Synthetic
gcacuuugaaccuggaaaa

SEQ ID NO: 11086 - RNA, 19 nt, Artificial Sequence
  Synthetic
gagaccggaucuuggaaau

SEQ ID NO: 11087 - RNA, 19 nt, Artificial Sequence
  Synthetic
agaacguaugggagaggaa

SEQ ID NO: 11088 - RNA, 19 nt, Artificial Sequence
  Synthetic
acccagacgcagaacaaua

SEQ ID NO: 11089 - RNA, 19 nt, Artificial Sequence
  Synthetic
gcccagaugugaagaauuc

SEQ ID NO: 11090 - RNA, 19 nt, Artificial Sequence
  Synthetic
gaggagacccagaggacgu

SEQ ID NO: 11091 - RNA, 19 nt, Artificial Sequence
  Synthetic
agauugaccugcugauuca

SEQ ID NO: 11092 - RNA, 19 nt, Artificial Sequence
  Synthetic
gcaugagcccagaugugaa

SEQ ID NO: 11093 - RNA, 19 nt, Artificial Sequence
  Synthetic
augagaagguggauguguu

SEQ ID NO: 11094 - RNA, 19 nt, Artificial Sequence
  Synthetic
aggugauggugaugaagga

SEQ ID NO: 11095 - RNA, 19 nt, Artificial Sequence
  Synthetic
gagcaucuaggaaguauua

SEQ ID NO: 11096 - RNA, 19 nt, Artificial Sequence
  Synthetic
aaacccagacgcagaacaa

SEQ ID NO: 11097 - RNA, 19 nt, Artificial Sequence
  Synthetic
caggugaggugauggugau

SEQ ID NO: 11098 - RNA, 19 nt, Artificial Sequence
  Synthetic
ccaacgugcucaaguucau

SEQ ID NO: 11099 - RNA, 19 nt, Artificial Sequence
  Synthetic
aggugaaggucaugcgaug

SEQ ID NO: 11100 - RNA, 19 nt, Artificial Sequence
  Synthetic
ccuacacgcugguggagca

SEQ ID NO: 11101 - RNA, 19 nt, Artificial Sequence
  Synthetic
ggagaccggaucuuggaaa

SEQ ID NO: 11102 - RNA, 19 nt, Artificial Sequence
  Synthetic
ggauggcaccugagaugau

SEQ ID NO: 11103 - RNA, 19 nt, Artificial Sequence
  Synthetic
gggcuugggauuuuauuuu

SEQ ID NO: 11104 - RNA, 19 nt, Artificial Sequence
  Synthetic
ggagggccugugugaguua

SEQ ID NO: 11105 - RNA, 19 nt, Artificial Sequence
  Synthetic
ggucaugcgaugccuggaa

SEQ ID NO: 11106 - RNA, 19 nt, Artificial Sequence
  Synthetic
gcuacacgguggugggaaa

SEQ ID NO: 11107 - RNA, 19 nt, Artificial Sequence
  Synthetic
cuuaauaugugguggaaca

SEQ ID NO: 11108 - RNA, 19 nt, Artificial Sequence
  Synthetic
cugcagagcuggaggaguu

SEQ ID NO: 11109 - RNA, 19 nt, Artificial Sequence
  Synthetic
gcugagaacuuacggacaa

SEQ ID NO: 11110 - RNA, 19 nt, Artificial Sequence
  Synthetic
gcugagaugcugagagaga

SEQ ID NO: 11111 - RNA, 19 nt, Artificial Sequence
  Synthetic
ggaagaagauggggaguua

SEQ ID NO: 11112 - RNA, 19 nt, Artificial Sequence
  Synthetic
ucauaguggaagagaggaa

SEQ ID NO: 11113 - RNA, 19 nt, Artificial Sequence
  Synthetic
cugagaugcugaacggaaa

SEQ ID NO: 11114 - RNA, 19 nt, Artificial Sequence
  Synthetic
gcaaagugauggucaugaa

SEQ ID NO: 11115 - RNA, 19 nt, Artificial Sequence
  Synthetic
ggagagugguugcuguuaa

SEQ ID NO: 11116 - RNA, 19 nt, Artificial Sequence
  Synthetic
ggaaagagcuaugaugaga

SEQ ID NO: 11117 - RNA, 19 nt, Artificial Sequence
  Synthetic
acacaaagccacgggcaaa

SEQ ID NO: 11118 - RNA, 19 nt, Artificial Sequence
  Synthetic
aagcugagaugcugagaga

SEQ ID NO: 11119 - RNA, 19 nt, Artificial Sequence
  Synthetic
ugaaagcugugaagaagaa

SEQ ID NO: 11120 - RNA, 19 nt, Artificial Sequence
  Synthetic
gagcaagguugagggagua

SEQ ID NO: 11121 - RNA, 19 nt, Artificial Sequence
  Synthetic
ugaaagaggucaaccggau

SEQ ID NO: 11122 - RNA, 19 nt, Artificial Sequence
  Synthetic
ggucagaguuuacuugcua

SEQ ID NO: 11123 - RNA, 19 nt, Artificial Sequence
  Synthetic
agacuguggugguggcaga

SEQ ID NO: 11124 - RNA, 19 nt, Artificial Sequence
  Synthetic
aagugauggucaugaaaga

SEQ ID NO: 11125 - RNA, 19 nt, Artificial Sequence
  Synthetic
uguaugagcugcaagguga

SEQ ID NO: 11126 - RNA, 19 nt, Artificial Sequence
  Synthetic
augaugagacgguggauau

SEQ ID NO: 11127 - RNA, 19 nt, Artificial Sequence
  Synthetic
cgggcaaagugauggucau

SEQ ID NO: 11128 - RNA, 19 nt, Artificial Sequence
  Synthetic
gaacaggccaggaguuaga

SEQ ID NO: 11129 - RNA, 19 nt, Artificial Sequence
  Synthetic
ccugagaugcugaacggaa

SEQ ID NO: 11130 - RNA, 19 nt, Artificial Sequence
  Synthetic
gaacaagccauuccuauua

SEQ ID NO: 11131 - RNA, 19 nt, Artificial Sequence
  Synthetic
gaguggaggagguggagga

SEQ ID NO: 11132 - RNA, 19 nt, Artificial Sequence
  Synthetic
ucccagagcucuaggaacu

SEQ ID NO: 11133 - RNA, 19 nt, Artificial Sequence
  Synthetic
uggaacaggccaggaguua

SEQ ID NO: 11134 - RNA, 19 nt, Artificial Sequence
  Synthetic
acuaugagaaggaugggaa

SEQ ID NO: 11135 - RNA, 19 nt, Artificial Sequence
  Synthetic
acauagaccugaugaguug

SEQ ID NO: 11136 - RNA, 19 nt, Artificial Sequence
  Synthetic
cuguaaggacccagaaaua

SEQ ID NO: 11137 - RNA, 19 nt, Artificial Sequence
  Synthetic
ccaagucauuagagagaga

SEQ ID NO: 11138 - RNA, 19 nt, Artificial Sequence
  Synthetic
gcgaugacuucgagacaca

SEQ ID NO: 11139 - RNA, 19 nt, Artificial Sequence
  Synthetic
gcuacgaaacagagaacuu

SEQ ID NO: 11140 - RNA, 19 nt, Artificial Sequence
  Synthetic
gcucugaagccgaacacaa

SEQ ID NO: 11141 - RNA, 19 nt, Artificial Sequence
  Synthetic
cauuagagagagagacaca

SEQ ID NO: 11142 - RNA, 19 nt, Artificial Sequence
  Synthetic
gaggacuggaagaaggaaa

SEQ ID NO: 11143 - RNA, 19 nt, Artificial Sequence
  Synthetic
ccagcaaagaacacauaaa

SEQ ID NO: 11144 - RNA, 19 nt, Artificial Sequence
  Synthetic
acauacaggaaauuggaaa

SEQ ID NO: 11145 - RNA, 19 nt, Artificial Sequence
  Synthetic
gugaaggaguuaaaagcaa

SEQ ID NO: 11146 - RNA, 19 nt, Artificial Sequence
  Synthetic
cggaagaccaucacaguca

SEQ ID NO: 11147 - RNA, 19 nt, Artificial Sequence
  Synthetic
cgaacgaacuccuugccua

SEQ ID NO: 11148 - RNA, 19 nt, Artificial Sequence
  Synthetic
gugccaacccaaaggaaca

SEQ ID NO: 11149 - RNA, 19 nt, Artificial Sequence
  Synthetic
ggaaggugauccugggaga

SEQ ID NO: 11150 - RNA, 19 nt, Artificial Sequence
  Synthetic
aggagaaagcgcuggagaa

SEQ ID NO: 11151 - RNA, 19 nt, Artificial Sequence
  Synthetic
uggaagaagaagaggagga

SEQ ID NO: 11152 - RNA, 19 nt, Artificial Sequence
  Synthetic
aagaagaagaggaggagga

SEQ ID NO: 11153 - RNA, 19 nt, Artificial Sequence
  Synthetic
cgcaaaggccggaugggua

SEQ ID NO: 11154 - RNA, 19 nt, Artificial Sequence
  Synthetic
ccccaaagagcgaggacaa

SEQ ID NO: 11155 - RNA, 19 nt, Artificial Sequence
  Synthetic
ccgagagagaagagaaagu

SEQ ID NO: 11156 - RNA, 19 nt, Artificial Sequence
  Synthetic
aggacgaggaggaggacga

SEQ ID NO: 11157 - RNA, 19 nt, Artificial Sequence
  Synthetic
aggacgaggacgaggacga

SEQ ID NO: 11158 - RNA, 19 nt, Artificial Sequence
  Synthetic
gagaagagaaagugcugga

SEQ ID NO: 11159 - RNA, 19 nt, Artificial Sequence
  Synthetic
aggacgaggacgaggagga

SEQ ID NO: 11160 - RNA, 19 nt, Artificial Sequence
  Synthetic
aguccugggcaacgggaaa

SEQ ID NO: 11161 - RNA, 19 nt, Artificial Sequence
  Synthetic
agagaaagugcuggagaau

SEQ ID NO: 11162 - RNA, 19 nt, Artificial Sequence
  Synthetic
gaagagaaagugcuggaga

SEQ ID NO: 11163 - RNA, 19 nt, Artificial Sequence
  Synthetic
ggguggaagaagaagagga

SEQ ID NO: 11164 - RNA, 19 nt, Artificial Sequence
  Synthetic
acuacaaggaggacuacua

SEQ ID NO: 11165 - RNA, 19 nt, Artificial Sequence
  Synthetic
cuggagaggaagcgcaaga

SEQ ID NO: 11166 - RNA, 19 nt, Artificial Sequence
  Synthetic
ccaaggaaguugagcuaua

SEQ ID NO: 11167 - RNA, 19 nt, Artificial Sequence
  Synthetic
aaagauagcagcugggaaa

SEQ ID NO: 11168 - RNA, 19 nt, Artificial Sequence
  Synthetic
gggcaaugcuggaaaggau

SEQ ID NO: 11169 - RNA, 19 nt, Artificial Sequence
  Synthetic
gaaauuagacacuaggaaa

SEQ ID NO: 11170 - RNA, 19 nt, Artificial Sequence
  Synthetic
cagaggaaauagaauguaa

SEQ ID NO: 11171 - RNA, 19 nt, Artificial Sequence
  Synthetic
ucauagacacagagacaaa

SEQ ID NO: 11172 - RNA, 19 nt, Artificial Sequence
  Synthetic
gguaugaggugaucaggaa

SEQ ID NO: 11173 - RNA, 19 nt, Artificial Sequence
  Synthetic
ucaaauguguucagaggaa

SEQ ID NO: 11174 - RNA, 19 nt, Artificial Sequence
  Synthetic
gggauuaucaucugggcaa

SEQ ID NO: 11175 - RNA, 19 nt, Artificial Sequence
  Synthetic
aggaaaugcuggcugcaaa

SEQ ID NO: 11176 - RNA, 19 nt, Artificial Sequence
  Synthetic
gaaaagaugguuagugaua

SEQ ID NO: 11177 - RNA, 19 nt, Artificial Sequence
  Synthetic
agacauuccucgucaguau

SEQ ID NO: 11178 - RNA, 19 nt, Artificial Sequence
  Synthetic
auucauagacacagagaca

SEQ ID NO: 11179 - RNA, 19 nt, Artificial Sequence
  Synthetic
gauaacgucuagucaauaa

SEQ ID NO: 11180 - RNA, 19 nt, Artificial Sequence
  Synthetic
auccaaagcugcugaagua

SEQ ID NO: 11181 - RNA, 19 nt, Artificial Sequence
  Synthetic
gcaaauaccauggaugaua

SEQ ID NO: 11182 - RNA, 19 nt, Artificial Sequence
  Synthetic
gggagaagauacauacaca

SEQ ID NO: 11183 - RNA, 19 nt, Artificial Sequence
  Synthetic
ccaggaaacccaaucguaa

SEQ ID NO: 11184 - RNA, 19 nt, Artificial Sequence
  Synthetic
gcacuaagcaguaucaaga

SEQ ID NO: 11185 - RNA, 19 nt, Artificial Sequence
  Synthetic
caggaaacccaaucguaaa

SEQ ID NO: 11186 - RNA, 19 nt, Artificial Sequence
  Synthetic
aaacagaacauuagccuuu

SEQ ID NO: 11187 - RNA, 19 nt, Artificial Sequence
  Synthetic
gaggagauaugaaugagua

SEQ ID NO: 11188 - RNA, 19 nt, Artificial Sequence
  Synthetic
ggaaaggaucacauucaua

SEQ ID NO: 11189 - RNA, 19 nt, Artificial Sequence
  Synthetic
ggagguaggccgagguagu

SEQ ID NO: 11190 - RNA, 19 nt, Artificial Sequence
  Synthetic
acacagagacaaagaagga

SEQ ID NO: 11191 - RNA, 19 nt, Artificial Sequence
  Synthetic
aagaaaagaugguuaguga

SEQ ID NO: 11192 - RNA, 19 nt, Artificial Sequence
  Synthetic
ggauagaaugcuuuccuaa

SEQ ID NO: 11193 - RNA, 19 nt, Artificial Sequence
  Synthetic
guuaguuccuagaauguua

SEQ ID NO: 11194 - RNA, 19 nt, Artificial Sequence
  Synthetic
uaacagugaugcaacauua

SEQ ID NO: 11195 - RNA, 19 nt, Artificial Sequence
  Synthetic
cauuauuccucuugaaguu

SEQ ID NO: 11196 - RNA, 19 nt, Artificial Sequence
  Synthetic
gcuacuuccuuauggcuaa

SEQ ID NO: 11197 - RNA, 19 nt, Artificial Sequence
  Synthetic
acacacuccucucaagcaa

SEQ ID NO: 11198 - RNA, 19 nt, Artificial Sequence
  Synthetic
gccaggaggccguguaaug

SEQ ID NO: 11199 - RNA, 19 nt, Artificial Sequence
  Synthetic
ucugggagaugcucaaguu

SEQ ID NO: 11200 - RNA, 19 nt, Artificial Sequence
  Synthetic
acacuccucucaagcaaaa

SEQ ID NO: 11201 - RNA, 19 nt, Artificial Sequence
  Synthetic
guggaccgcuacuuccuua

SEQ ID NO: 11202 - RNA, 19 nt, Artificial Sequence
  Synthetic
ccaggaggccguguaauga

SEQ ID NO: 11203 - RNA, 19 nt, Artificial Sequence
  Synthetic
aggaagaagacguggacaa

SEQ ID NO: 11204 - RNA, 19 nt, Artificial Sequence
  Synthetic
auacaaagaucgacacaau

SEQ ID NO: 11205 - RNA, 19 nt, Artificial Sequence
  Synthetic
caguguaaucuguaagaaa

SEQ ID NO: 11206 - RNA, 19 nt, Artificial Sequence
  Synthetic
cugaaauggaugaacauaa

SEQ ID NO: 11207 - RNA, 19 nt, Artificial Sequence
  Synthetic
gggagagcuaggauggaaa

SEQ ID NO: 11208 - RNA, 19 nt, Artificial Sequence
  Synthetic
guacaggauaugaagaaau

SEQ ID NO: 11209 - RNA, 19 nt, Artificial Sequence
  Synthetic
ccacggaucaagaugguaa

SEQ ID NO: 11210 - RNA, 19 nt, Artificial Sequence
  Synthetic
augaagaaauugaggguuc

SEQ ID NO: 11211 - RNA, 19 nt, Artificial Sequence
  Synthetic
caacaacuguacugggaga

SEQ ID NO: 11212 - RNA, 19 nt, Artificial Sequence
  Synthetic
caguacaggauaugaagaa

SEQ ID NO: 11213 - RNA, 19 nt, Artificial Sequence
  Synthetic
cgugauaguacuugacuuu

SEQ ID NO: 11214 - RNA, 19 nt, Artificial Sequence
  Synthetic
guaauguaauggaaccaaa

SEQ ID NO: 11215 - RNA, 19 nt, Artificial Sequence
  Synthetic
ucuuuaagggagaggaaaa

SEQ ID NO: 11216 - RNA, 19 nt, Artificial Sequence
  Synthetic
gugaauuacaccuuugaaa

SEQ ID NO: 11217 - RNA, 19 nt, Artificial Sequence
  Synthetic
ggaucaagaugguaaguuc

SEQ ID NO: 11218 - RNA, 19 nt, Artificial Sequence
  Synthetic
cgacaggauaagaaggaua

SEQ ID NO: 11219 - RNA, 19 nt, Artificial Sequence
  Synthetic
cugccaagcuuguugcaaa

SEQ ID NO: 11220 - RNA, 19 nt, Artificial Sequence
  Synthetic
gcagaagccauaaggagaa

SEQ ID NO: 11221 - RNA, 19 nt, Artificial Sequence
  Synthetic
uaggcaagguggugacuaa

SEQ ID NO: 11222 - RNA, 19 nt, Artificial Sequence
  Synthetic
gauuaaugccugcaagauu

SEQ ID NO: 11223 - RNA, 19 nt, Artificial Sequence
  Synthetic
gaguggaagaacugcauua

SEQ ID NO: 11224 - RNA, 19 nt, Artificial Sequence
  Synthetic
ccaaugaaguggacugcau

SEQ ID NO: 11225 - RNA, 19 nt, Artificial Sequence
  Synthetic
ggaagaaggccaaugaagu

SEQ ID NO: 11226 - RNA, 19 nt, Artificial Sequence
  Synthetic
gaugagaagaugaagcauu

SEQ ID NO: 11227 - RNA, 19 nt, Artificial Sequence
  Synthetic
agaauaucccugaguggaa

SEQ ID NO: 11228 - RNA, 19 nt, Artificial Sequence
  Synthetic
gagugugcguggagaggau

SEQ ID NO: 11229 - RNA, 19 nt, Artificial Sequence
  Synthetic
ugacuaagaaauucagcaa

SEQ ID NO: 11230 - RNA, 19 nt, Artificial Sequence
  Synthetic
caaccagaguuuaugcuau

SEQ ID NO: 11231 - RNA, 19 nt, Artificial Sequence
  Synthetic
gacaggauaagaaggauaa

SEQ ID NO: 11232 - RNA, 19 nt, Artificial Sequence
  Synthetic
uaauggagcuuuugaucau

SEQ ID NO: 11233 - RNA, 19 nt, Artificial Sequence
  Synthetic
ccuacaugcuucucaaauu

SEQ ID NO: 11234 - RNA, 19 nt, Artificial Sequence
  Synthetic
gcuagugggagaugugaau

SEQ ID NO: 11235 - RNA, 19 nt, Artificial Sequence
  Synthetic
cagagugguuguggcgaaa

SEQ ID NO: 11236 - RNA, 19 nt, Artificial Sequence
  Synthetic
ccuuaugcccgacaggaua

SEQ ID NO: 11237 - RNA, 19 nt, Artificial Sequence
  Synthetic
gcaagguggugacuaagaa

SEQ ID NO: 11238 - RNA, 19 nt, Artificial Sequence
  Synthetic
gaaaucaacgacagucuaa

SEQ ID NO: 11239 - RNA, 19 nt, Artificial Sequence
  Synthetic
gauccuugcagaagccaua

SEQ ID NO: 11240 - RNA, 19 nt, Artificial Sequence
  Synthetic
cagccauguuccuuuauaa

SEQ ID NO: 11241 - RNA, 19 nt, Artificial Sequence
  Synthetic
acuucuagguuaugcuauu

SEQ ID NO: 11242 - RNA, 19 nt, Artificial Sequence
  Synthetic
caucaacacugcaugcuuu

SEQ ID NO: 11243 - RNA, 19 nt, Artificial Sequence
  Synthetic
gagcuuuugaucaugauua

SEQ ID NO: 11244 - RNA, 19 nt, Artificial Sequence
  Synthetic
ggaccaauguuuugugaaa

SEQ ID NO: 11245 - RNA, 19 nt, Artificial Sequence
  Synthetic
cuaaagaccuuaaccaaua

SEQ ID NO: 11246 - RNA, 19 nt, Artificial Sequence
  Synthetic
ggacauggcuaaagaccuu

SEQ ID NO: 11247 - RNA, 19 nt, Artificial Sequence
  Synthetic
agaagaacuuggagacauu

SEQ ID NO: 11248 - RNA, 19 nt, Artificial Sequence
  Synthetic
caucaguuguugaguuaaa

SEQ ID NO: 11249 - RNA, 19 nt, Artificial Sequence
  Synthetic
gggaaugguuuucaaagaa

SEQ ID NO: 11250 - RNA, 19 nt, Artificial Sequence
  Synthetic
gugaauuguuggauaugaa

SEQ ID NO: 11251 - RNA, 19 nt, Artificial Sequence
  Synthetic
ccagugaauuguuggauau

SEQ ID NO: 11252 - RNA, 19 nt, Artificial Sequence
  Synthetic
ggauaugaauucccuguua

SEQ ID NO: 11253 - RNA, 19 nt, Artificial Sequence
  Synthetic
ggacuugguuugcauauaa

SEQ ID NO: 11254 - RNA, 19 nt, Artificial Sequence
  Synthetic
gcuaaagaccuuaaccaau

SEQ ID NO: 11255 - RNA, 19 nt, Artificial Sequence
  Synthetic
cauuugaucuggauggauu

SEQ ID NO: 11256 - RNA, 19 nt, Artificial Sequence
  Synthetic
gcacgcaggacauggcuaa

SEQ ID NO: 11257 - RNA, 19 nt, Artificial Sequence
  Synthetic
ggacaacccuugaaaucau

SEQ ID NO: 11258 - RNA, 19 nt, Artificial Sequence
  Synthetic
ggucaaggauacugauaaa

SEQ ID NO: 11259 - RNA, 19 nt, Artificial Sequence
  Synthetic
gagcaaagcaggaggucuu

SEQ ID NO: 11260 - RNA, 19 nt, Artificial Sequence
  Synthetic
aaucauauggucaaggaua

SEQ ID NO: 11261 - RNA, 19 nt, Artificial Sequence
  Synthetic
caaauuacgaccugaaaau

SEQ ID NO: 11262 - RNA, 19 nt, Artificial Sequence
  Synthetic
aguacucacuguaugcaaa

SEQ ID NO: 11263 - RNA, 19 nt, Artificial Sequence
  Synthetic
gcaaauuacgaccugaaaa

SEQ ID NO: 11264 - RNA, 19 nt, Artificial Sequence
  Synthetic
gauaaaguacucacuguau

SEQ ID NO: 11265 - RNA, 19 nt, Artificial Sequence
  Synthetic
agaaugugguggaggagaa

SEQ ID NO: 11266 - RNA, 19 nt, Artificial Sequence
  Synthetic
ccucggagcucgugcacua

SEQ ID NO: 11267 - RNA, 19 nt, Artificial Sequence
  Synthetic
ggagauggcuguacuggaa

SEQ ID NO: 11268 - RNA, 19 nt, Artificial Sequence
  Synthetic
ucauggagcuggacaaauu

SEQ ID NO: 11269 - RNA, 19 nt, Artificial Sequence
  Synthetic
uggagagaagcgaggacaa

SEQ ID NO: 11270 - RNA, 19 nt, Artificial Sequence
  Synthetic
cugagaaugugguggagga

SEQ ID NO: 11271 - RNA, 19 nt, Artificial Sequence
  Synthetic
ccagaaaggucauccagau

SEQ ID NO: 11272 - RNA, 19 nt, Artificial Sequence
  Synthetic
gaaucuacccacugaugaa

SEQ ID NO: 11273 - RNA, 19 nt, Artificial Sequence
  Synthetic
aggagaagaccaaggccau

SEQ ID NO: 11274 - RNA, 19 nt, Artificial Sequence
  Synthetic
ccuucauggagcuggacaa

SEQ ID NO: 11275 - RNA, 19 nt, Artificial Sequence
  Synthetic
gaggagaagaccaaggcca

SEQ ID NO: 11276 - RNA, 19 nt, Artificial Sequence
  Synthetic
agugcaaccuggagagaag

SEQ ID NO: 11277 - RNA, 19 nt, Artificial Sequence
  Synthetic
gaggaugucaggaauggaa

SEQ ID NO: 11278 - RNA, 19 nt, Artificial Sequence
  Synthetic
gagauggcuguacuggaaa

SEQ ID NO: 11279 - RNA, 19 nt, Artificial Sequence
  Synthetic
ggagagaagcgaggacaag

SEQ ID NO: 11280 - RNA, 19 nt, Artificial Sequence
  Synthetic
ggaaucuacccacugauga

SEQ ID NO: 11281 - RNA, 19 nt, Artificial Sequence
  Synthetic
ugucaggaauggaaucuac

SEQ ID NO: 11282 - RNA, 19 nt, Artificial Sequence
  Synthetic
ggucacagaggaggccauu

SEQ ID NO: 11283 - RNA, 19 nt, Artificial Sequence
  Synthetic
agagcaccuuccucaagua

SEQ ID NO: 11284 - RNA, 19 nt, Artificial Sequence
  Synthetic
augcgggaguucauccuuu

SEQ ID NO: 11285 - RNA, 19 nt, Artificial Sequence
  Synthetic
gcagugcaaccuggagaga

SEQ ID NO: 11286 - RNA, 19 nt, Artificial Sequence
  Synthetic
aauggaaucuacccacuga

SEQ ID NO: 11287 - RNA, 19 nt, Artificial Sequence
  Synthetic
ucuacccacugaugaacuu

SEQ ID NO: 11288 - RNA, 19 nt, Artificial Sequence
  Synthetic
gagagcaccuuccucaagu

SEQ ID NO: 11289 - RNA, 19 nt, Artificial Sequence
  Synthetic
ucacagaggaggccauugc

SEQ ID NO: 11290 - RNA, 19 nt, Artificial Sequence
  Synthetic
uggaaucuacccacugaug

SEQ ID NO: 11291 - RNA, 19 nt, Artificial Sequence
  Synthetic
uggaggaugucaggaaugg

SEQ ID NO: 11292 - RNA, 19 nt, Artificial Sequence
  Synthetic
ggagagcaccuuccucaag

SEQ ID NO: 11293 - RNA, 19 nt, Artificial Sequence
  Synthetic
caacaugcgggaguucauc

SEQ ID NO: 11294 - RNA, 19 nt, Artificial Sequence
  Synthetic
ugcgggaguucauccuuug

SEQ ID NO: 11295 - RNA, 19 nt, Artificial Sequence
  Synthetic
ggagaaaggaagaaacuua

SEQ ID NO: 11296 - RNA, 19 nt, Artificial Sequence
  Synthetic
ccaaagugcuggacaauau

SEQ ID NO: 11297 - RNA, 19 nt, Artificial Sequence
  Synthetic
cagcaaagcagaugugaau

SEQ ID NO: 11298 - RNA, 19 nt, Artificial Sequence
  Synthetic
gauuugugccuaaggaaua

SEQ ID NO: 11299 - RNA, 19 nt, Artificial Sequence
  Synthetic
gaaccaagacagaauguau

SEQ ID NO: 11300 - RNA, 19 nt, Artificial Sequence
  Synthetic
uuacaaggauaaugcagaa

SEQ ID NO: 11301 - RNA, 19 nt, Artificial Sequence
  Synthetic
aaaggacgaugcagaaaua

SEQ ID NO: 11302 - RNA, 19 nt, Artificial Sequence
  Synthetic
ggaacaaccuagaagcuuu

SEQ ID NO: 11303 - RNA, 19 nt, Artificial Sequence
  Synthetic
ggacagugcugacagacaa

SEQ ID NO: 11304 - RNA, 19 nt, Artificial Sequence
  Synthetic
ccucagagacccugcagaa

SEQ ID NO: 11305 - RNA, 19 nt, Artificial Sequence
  Synthetic
ccucagaagaccagcugua

SEQ ID NO: 11306 - RNA, 19 nt, Artificial Sequence
  Synthetic
acucaaggccugcuguuua

SEQ ID NO: 11307 - RNA, 19 nt, Artificial Sequence
  Synthetic
caagucaacaaguggaaga

SEQ ID NO: 11308 - RNA, 19 nt, Artificial Sequence
  Synthetic
cagccaguguccuagcaaa

SEQ ID NO: 11309 - RNA, 19 nt, Artificial Sequence
  Synthetic
ugaaaccucuccuaagaaa

SEQ ID NO: 11310 - RNA, 19 nt, Artificial Sequence
  Synthetic
cugcauggguuucgguguu

SEQ ID NO: 11311 - RNA, 19 nt, Artificial Sequence
  Synthetic
ccucugugcuuugguaaua

SEQ ID NO: 11312 - RNA, 19 nt, Artificial Sequence
  Synthetic
ccaccucacuugaagcuuu

SEQ ID NO: 11313 - RNA, 19 nt, Artificial Sequence
  Synthetic
gaacaagaucgacgucaau

SEQ ID NO: 11314 - RNA, 19 nt, Artificial Sequence
  Synthetic
ccacugaggacuuagagau

SEQ ID NO: 11315 - RNA, 19 nt, Artificial Sequence
  Synthetic
caagauguauagugagaug

SEQ ID NO: 11316 - RNA, 19 nt, Artificial Sequence
  Synthetic
cugcagaacuccacggcaa

SEQ ID NO: 11317 - RNA, 19 nt, Artificial Sequence
  Synthetic
gcaugaacgagaagcggaa

SEQ ID NO: 11318 - RNA, 19 nt, Artificial Sequence
  Synthetic
ccaacgugcugcagcucua

SEQ ID NO: 11319 - RNA, 19 nt, Artificial Sequence
  Synthetic
uauaaugccuacagguuuu

SEQ ID NO: 11320 - RNA, 19 nt, Artificial Sequence
  Synthetic
ucacauaccuccugccuca

SEQ ID NO: 11321 - RNA, 19 nt, Artificial Sequence
  Synthetic
cuauaaugccuacagguuu

SEQ ID NO: 11322 - RNA, 19 nt, Artificial Sequence
  Synthetic
cgcucaaggcgguggacuu

SEQ ID NO: 11323 - RNA, 19 nt, Artificial Sequence
  Synthetic
uggcugaggcuguggaugu

SEQ ID NO: 11324 - RNA, 19 nt, Artificial Sequence
  Synthetic
gcgagggcaugaacgagaa

SEQ ID NO: 11325 - RNA, 19 nt, Artificial Sequence
  Synthetic
gcucaaggcgguggacuuu

SEQ ID NO: 11326 - RNA, 19 nt, Artificial Sequence
  Synthetic
cgacugcauacucgaguuu

SEQ ID NO: 11327 - RNA, 19 nt, Artificial Sequence
  Synthetic
acgagaagcggaaccucua

SEQ ID NO: 11328 - RNA, 19 nt, Artificial Sequence
  Synthetic
ucuauaaugccuacagguu

SEQ ID NO: 11329 - RNA, 19 nt, Artificial Sequence
  Synthetic
gagaagcggaaccucuaua

SEQ ID NO: 11330 - RNA, 19 nt, Artificial Sequence
  Synthetic
uggcccagcuggagaaggu

SEQ ID NO: 11331 - RNA, 19 nt, Artificial Sequence
  Synthetic
ggacuuuagcggccacgau

SEQ ID NO: 11332 - RNA, 19 nt, Artificial Sequence
  Synthetic
ccaacaagaccacauaugu

SEQ ID NO: 11333 - RNA, 19 nt, Artificial Sequence
  Synthetic
agaagcggaaccucuauaa

SEQ ID NO: 11334 - RNA, 19 nt, Artificial Sequence
  Synthetic
gaagcggaaccucuauaau

SEQ ID NO: 11335 - RNA, 19 nt, Artificial Sequence
  Synthetic
aagcggaaccucuauaaug

SEQ ID NO: 11336 - RNA, 19 nt, Artificial Sequence
  Synthetic
caaagugacggaccuggau

SEQ ID NO: 11337 - RNA, 19 nt, Artificial Sequence
  Synthetic
caagcagcaguaccgagua

SEQ ID NO: 11338 - RNA, 19 nt, Artificial Sequence
  Synthetic
cagacacccugaccaccau

SEQ ID NO: 11339 - RNA, 19 nt, Artificial Sequence
  Synthetic
ucaaggcgguggacuuuag

SEQ ID NO: 11340 - RNA, 19 nt, Artificial Sequence
  Synthetic
ugagagccaugcccagugu

SEQ ID NO: 11341 - RNA, 19 nt, Artificial Sequence
  Synthetic
gagaagagcugcagaauga

SEQ ID NO: 11342 - RNA, 19 nt, Artificial Sequence
  Synthetic
gaauaaagagcgaguggaa

SEQ ID NO: 11343 - RNA, 19 nt, Artificial Sequence
  Synthetic
gagagaagcugaaggugaa

SEQ ID NO: 11344 - RNA, 19 nt, Artificial Sequence
  Synthetic
ggaagaagagggaggaaaa

SEQ ID NO: 11345 - RNA, 19 nt, Artificial Sequence
  Synthetic
ggugagagcugaagcagua

SEQ ID NO: 11346 - RNA, 19 nt, Artificial Sequence
  Synthetic
cagagaaguugcagagcau

SEQ ID NO: 11347 - RNA, 19 nt, Artificial Sequence
  Synthetic
cgagagaagcugaagguga

SEQ ID NO: 11348 - RNA, 19 nt, Artificial Sequence
  Synthetic
gccaacagguuaaggaaau

SEQ ID NO: 11349 - RNA, 19 nt, Artificial Sequence
  Synthetic
auaaagagcgaguggaaga

SEQ ID NO: 11350 - RNA, 19 nt, Artificial Sequence
  Synthetic
guacaagccucgagagaag

SEQ ID NO: 11351 - RNA, 19 nt, Artificial Sequence
  Synthetic
gcagaaauacauagcucaa

SEQ ID NO: 11352 - RNA, 19 nt, Artificial Sequence
  Synthetic
gagugaaggcagaggagga

SEQ ID NO: 11353 - RNA, 19 nt, Artificial Sequence
  Synthetic
gggaggacgugaagaacga

SEQ ID NO: 11354 - RNA, 19 nt, Artificial Sequence
  Synthetic
gcucaaagaaaauggaaga

SEQ ID NO: 11355 - RNA, 19 nt, Artificial Sequence
  Synthetic
acgugaagaacgagaucaa

SEQ ID NO: 11356 - RNA, 19 nt, Artificial Sequence
  Synthetic
cggaggaggccaaggacuu

SEQ ID NO: 11357 - RNA, 19 nt, Artificial Sequence
  Synthetic
ggaucacagaugagaagua

SEQ ID NO: 11358 - RNA, 19 nt, Artificial Sequence
  Synthetic
gagaacauauugugcguca

SEQ ID NO: 11359 - RNA, 19 nt, Artificial Sequence
  Synthetic
gaggaaggcacgaggcuga

SEQ ID NO: 11360 - RNA, 19 nt, Artificial Sequence
  Synthetic
uggaagaagagggaggaaa

SEQ ID NO: 11361 - RNA, 19 nt, Artificial Sequence
  Synthetic
augcagagaccaugaauuu

SEQ ID NO: 11362 - RNA, 19 nt, Artificial Sequence
  Synthetic
agacaggacaucaaauuaa

SEQ ID NO: 11363 - RNA, 19 nt, Artificial Sequence
  Synthetic
cgggaaacccugagccuga

SEQ ID NO: 11364 - RNA, 19 nt, Artificial Sequence
  Synthetic
gugacagcccugaggagaa

SEQ ID NO: 11365 - RNA, 19 nt, Artificial Sequence
  Synthetic
gagccuggcacgagaccaa

SEQ ID NO: 11366 - RNA, 19 nt, Artificial Sequence
  Synthetic
ccccagaagucgucaauua

SEQ ID NO: 11367 - RNA, 19 nt, Artificial Sequence
  Synthetic
aaacagaugcagagaccau

SEQ ID NO: 11368 - RNA, 19 nt, Artificial Sequence
  Synthetic
cgacaaugaccacgagguu

SEQ ID NO: 11369 - RNA, 19 nt, Artificial Sequence
  Synthetic
aaagagaagagcugcagaa

SEQ ID NO: 11370 - RNA, 19 nt, Artificial Sequence
  Synthetic
aaacacgaguggcugaaua

SEQ ID NO: 11371 - RNA, 19 nt, Artificial Sequence
  Synthetic
uuacaggaaaccagagaaa

SEQ ID NO: 11372 - RNA, 19 nt, Artificial Sequence
  Synthetic
gcaagagccuggaagguca

SEQ ID NO: 11373 - RNA, 19 nt, Artificial Sequence
  Synthetic
gggacgacgacgugcagua

SEQ ID NO: 11374 - RNA, 19 nt, Artificial Sequence
  Synthetic
gugagaaaucagaggaugu

SEQ ID NO: 11375 - RNA, 19 nt, Artificial Sequence
  Synthetic
gugcaguaccugacggaca

SEQ ID NO: 11376 - RNA, 19 nt, Artificial Sequence
  Synthetic
gagaaaucgcuguagcaca

SEQ ID NO: 11377 - RNA, 19 nt, Artificial Sequence
  Synthetic
uggcaaagguuuauagcac

SEQ ID NO: 11378 - RNA, 19 nt, Artificial Sequence
  Synthetic
acaggaaaccagagaaauc

SEQ ID NO: 11379 - RNA, 19 nt, Artificial Sequence
  Synthetic
gcaugaaggacgugggcag

SEQ ID NO: 11380 - RNA, 19 nt, Artificial Sequence
  Synthetic
cuauaaagaugcagaugaa

SEQ ID NO: 11381 - RNA, 19 nt, Artificial Sequence
  Synthetic
gcaaggagucaaagugaaa

SEQ ID NO: 11382 - RNA, 19 nt, Artificial Sequence
  Synthetic
cugcauagauguugacgaa

SEQ ID NO: 11383 - RNA, 19 nt, Artificial Sequence
  Synthetic
guacuaugauccugugaaa

SEQ ID NO: 11384 - RNA, 19 nt, Artificial Sequence
  Synthetic
cuguagagauauugaugaa

SEQ ID NO: 11385 - RNA, 19 nt, Artificial Sequence
  Synthetic
agauguagauguagaucaa

SEQ ID NO: 11386 - RNA, 19 nt, Artificial Sequence
  Synthetic
cacaagcacuguagagaua

SEQ ID NO: 11387 - RNA, 19 nt, Artificial Sequence
  Synthetic
ccuugaauuuagagaaaga

SEQ ID NO: 11388 - RNA, 19 nt, Artificial Sequence
  Synthetic
cgccuugaauuuagagaaa

SEQ ID NO: 11389 - RNA, 19 nt, Artificial Sequence
  Synthetic
acagugaccuggagugaaa

SEQ ID NO: 11390 - RNA, 19 nt, Artificial Sequence
  Synthetic
caacaggccagaagacaaa

SEQ ID NO: 11391 - RNA, 19 nt, Artificial Sequence
  Synthetic
ggaaauguguggauauuga

SEQ ID NO: 11392 - RNA, 19 nt, Artificial Sequence
  Synthetic
guauaugcuacgagggcua

SEQ ID NO: 11393 - RNA, 19 nt, Artificial Sequence
  Synthetic
agucaauauccaugugaaa

SEQ ID NO: 11394 - RNA, 19 nt, Artificial Sequence
  Synthetic
augaaugcuuggaggacaa

SEQ ID NO: 11395 - RNA, 19 nt, Artificial Sequence
  Synthetic
guucauagacgcaggccaa

SEQ ID NO: 11396 - RNA, 19 nt, Artificial Sequence
  Synthetic
ggaaauaccuucauuggau

SEQ ID NO: 11397 - RNA, 19 nt, Artificial Sequence
  Synthetic
ggaaguuucuugugcauuu

SEQ ID NO: 11398 - RNA, 19 nt, Artificial Sequence
  Synthetic
uggaaugccuaccggguua

SEQ ID NO: 11399 - RNA, 19 nt, Artificial Sequence
  Synthetic
ggacaagaaaucugcaaaa

SEQ ID NO: 11400 - RNA, 19 nt, Artificial Sequence
  Synthetic
ccaaagaagaaaagaaaga

SEQ ID NO: 11401 - RNA, 19 nt, Artificial Sequence
  Synthetic
ggaagaguuuauaagcuua

SEQ ID NO: 11402 - RNA, 19 nt, Artificial Sequence
  Synthetic
ccacagauuuagauguaga

SEQ ID NO: 11403 - RNA, 19 nt, Artificial Sequence
  Synthetic
ccaacaggccagaagacaa

SEQ ID NO: 11404 - RNA, 19 nt, Artificial Sequence
  Synthetic
auacuaagcugauguguuu

SEQ ID NO: 11405 - RNA, 19 nt, Artificial Sequence
  Synthetic
ggaauggguuauacgguuu

SEQ ID NO: 11406 - RNA, 19 nt, Artificial Sequence
  Synthetic
agaucaacccaaagaagaa

SEQ ID NO: 11407 - RNA, 19 nt, Artificial Sequence
  Synthetic
ccaggaaaccauuggguca

SEQ ID NO: 11408 - RNA, 19 nt, Artificial Sequence
  Synthetic
ccucaauggaugugaaaau

SEQ ID NO: 11409 - RNA, 19 nt, Artificial Sequence
  Synthetic
guguaaacgggcagugcaa

SEQ ID NO: 11410 - RNA, 19 nt, Artificial Sequence
  Synthetic
gugaagaggauguggauga

SEQ ID NO: 11411 - RNA, 19 nt, Artificial Sequence
  Synthetic
agaauauggucccgagauu

SEQ ID NO: 11412 - RNA, 19 nt, Artificial Sequence
  Synthetic
ggaugagugccaagaauau

SEQ ID NO: 11413 - RNA, 19 nt, Artificial Sequence
  Synthetic
gaugugaacgagugugaaa

SEQ ID NO: 11414 - RNA, 19 nt, Artificial Sequence
  Synthetic
ggccagacguuuaggagga

SEQ ID NO: 11415 - RNA, 19 nt, Artificial Sequence
  Synthetic
ggagcugcccugugugaaa

SEQ ID NO: 11416 - RNA, 19 nt, Artificial Sequence
  Synthetic
cggcuggagugcaucgaua

SEQ ID NO: 11417 - RNA, 19 nt, Artificial Sequence
  Synthetic
gcgaagauguggaugaaug

SEQ ID NO: 11418 - RNA, 19 nt, Artificial Sequence
  Synthetic
ggagagacguggacgaaug

SEQ ID NO: 11419 - RNA, 19 nt, Artificial Sequence
  Synthetic
uggaugagugccaagaaua

SEQ ID NO: 11420 - RNA, 19 nt, Artificial Sequence
  Synthetic
gugcaagaguggcgugugu

SEQ ID NO: 11421 - RNA, 19 nt, Artificial Sequence
  Synthetic
ccaggaggccagagcucua

SEQ ID NO: 11422 - RNA, 19 nt, Artificial Sequence
  Synthetic
cgaguacggcccagacuua

SEQ ID NO: 11423 - RNA, 19 nt, Artificial Sequence
  Synthetic
guggaugagugccaagaau

SEQ ID NO: 11424 - RNA, 19 nt, Artificial Sequence
  Synthetic
gccagagccucgaugacaa

SEQ ID NO: 11425 - RNA, 19 nt, Artificial Sequence
  Synthetic
gugcgaagauguggaugaa

SEQ ID NO: 11426 - RNA, 19 nt, Artificial Sequence
  Synthetic
gaacaucacuaaacagauc

SEQ ID NO: 11427 - RNA, 19 nt, Artificial Sequence
  Synthetic
guuaauggguccugcgaag

SEQ ID NO: 11428 - RNA, 19 nt, Artificial Sequence
  Synthetic
cggaaugccuggaugugga

SEQ ID NO: 11429 - RNA, 19 nt, Artificial Sequence
  Synthetic
ccugcgaagauguggauga

SEQ ID NO: 11430 - RNA, 19 nt, Artificial Sequence
  Synthetic
ugccagacuuugaggacga

SEQ ID NO: 11431 - RNA, 19 nt, Artificial Sequence
  Synthetic
caacagcccggaagaguuu

SEQ ID NO: 11432 - RNA, 19 nt, Artificial Sequence
  Synthetic
cauaugggccugaguugua

SEQ ID NO: 11433 - RNA, 19 nt, Artificial Sequence
  Synthetic
gcacugauguggacgaaug

SEQ ID NO: 11434 - RNA, 19 nt, Artificial Sequence
  Synthetic
gcaccgagacagcugagua

SEQ ID NO: 11435 - RNA, 19 nt, Artificial Sequence
  Synthetic
ccugugacgauguggauga

SEQ ID NO: 11436 - RNA, 19 nt, Artificial Sequence
  Synthetic
ucagaggguuuccgggaga

SEQ ID NO: 11437 - RNA, 19 nt, Artificial Sequence
  Synthetic
acucagaugccucgggcuu

SEQ ID NO: 11438 - RNA, 19 nt, Artificial Sequence
  Synthetic
gaggaggaccuuugccaga

SEQ ID NO: 11439 - RNA, 19 nt, Artificial Sequence
  Synthetic
ggaugagugugcccaggaa

SEQ ID NO: 11440 - RNA, 19 nt, Artificial Sequence
  Synthetic
gccacuaccuggaggaaaa

SEQ ID NO: 11441 - RNA, 19 nt, Artificial Sequence
  Synthetic
cgagaaccacggagaggua

SEQ ID NO: 11442 - RNA, 19 nt, Artificial Sequence
  Synthetic
ccucagaaccuuuggaauc

SEQ ID NO: 11443 - RNA, 19 nt, Artificial Sequence
  Synthetic
ggaacugaguccagagaag

SEQ ID NO: 11444 - RNA, 19 nt, Artificial Sequence
  Synthetic
gcaaaggcgccaagaacca

SEQ ID NO: 11445 - RNA, 19 nt, Artificial Sequence
  Synthetic
gggaacagaucuuuggagu

SEQ ID NO: 11446 - RNA, 19 nt, Artificial Sequence
  Synthetic
cugcagaugcuucuaauaa

SEQ ID NO: 11447 - RNA, 19 nt, Artificial Sequence
  Synthetic
gggcgacgcuucagagacu

SEQ ID NO: 11448 - RNA, 19 nt, Artificial Sequence
  Synthetic
gcacuugccaugcuggaaa

SEQ ID NO: 11449 - RNA, 19 nt, Artificial Sequence
  Synthetic
uggagcuagcuguggauaa

SEQ ID NO: 11450 - RNA, 19 nt, Artificial Sequence
  Synthetic
gggagguguaugagggacu

SEQ ID NO: 11451 - RNA, 19 nt, Artificial Sequence
  Synthetic
aggccuuccuggagggcau

SEQ ID NO: 11452 - RNA, 19 nt, Artificial Sequence
  Synthetic
gcagaugcuucuaauaaaa

SEQ ID NO: 11453 - RNA, 19 nt, Artificial Sequence
  Synthetic
cggcaaaggcgccaagaac

SEQ ID NO: 11454 - RNA, 19 nt, Artificial Sequence
  Synthetic
gcuccuggguggccuguua

SEQ ID NO: 11455 - RNA, 19 nt, Artificial Sequence
  Synthetic
ccacggagagguagagauc

SEQ ID NO: 11456 - RNA, 19 nt, Artificial Sequence
  Synthetic
guguaugagggacugguaa

SEQ ID NO: 11457 - RNA, 19 nt, Artificial Sequence
  Synthetic
cuggauugcuuucccauua

SEQ ID NO: 11458 - RNA, 19 nt, Artificial Sequence
  Synthetic
uguaugagggacugguaau

SEQ ID NO: 11459 - RNA, 19 nt, Artificial Sequence
  Synthetic
ccucugggcugauggggaa

SEQ ID NO: 11460 - RNA, 19 nt, Artificial Sequence
  Synthetic
ugcagaugcuucuaauaaa

SEQ ID NO: 11461 - RNA, 19 nt, Artificial Sequence
  Synthetic
gaggggacaugaagaguuu

SEQ ID NO: 11462 - RNA, 19 nt, Artificial Sequence
  Synthetic
gggccuugcucccagucaa

SEQ ID NO: 11463 - RNA, 19 nt, Artificial Sequence
  Synthetic
ccgagaaacuggagaaccg

SEQ ID NO: 11464 - RNA, 19 nt, Artificial Sequence
  Synthetic
uggcagucaccgagaacca

SEQ ID NO: 11465 - RNA, 19 nt, Artificial Sequence
  Synthetic
cccagaaggcauggagcua

SEQ ID NO: 11466 - RNA, 19 nt, Artificial Sequence
  Synthetic
caaaaugagcugucaacuu

SEQ ID NO: 11467 - RNA, 19 nt, Artificial Sequence
  Synthetic
ccucaucaucagcaaguuu

SEQ ID NO: 11468 - RNA, 19 nt, Artificial Sequence
  Synthetic
ugaauucacuccugccaau

SEQ ID NO: 11469 - RNA, 19 nt, Artificial Sequence
  Synthetic
gggaagauggaguauccuu

SEQ ID NO: 11470 - RNA, 19 nt, Artificial Sequence
  Synthetic
ccagaugcugcuagagaaa

SEQ ID NO: 11471 - RNA, 19 nt, Artificial Sequence
  Synthetic
gguacaaaccaacaggaga

SEQ ID NO: 11472 - RNA, 19 nt, Artificial Sequence
  Synthetic
ucucuaaacaggaggucau

SEQ ID NO: 11473 - RNA, 19 nt, Artificial Sequence
  Synthetic
acaucuacagugugggaau

SEQ ID NO: 11474 - RNA, 19 nt, Artificial Sequence
  Synthetic
ggauuaaccuagaagcuug

SEQ ID NO: 11475 - RNA, 19 nt, Artificial Sequence
  Synthetic
uaacauucuugcagggcga

SEQ ID NO: 11476 - RNA, 19 nt, Artificial Sequence
  Synthetic
gaaucuagcaagguacaaa

SEQ ID NO: 11477 - RNA, 19 nt, Artificial Sequence
  Synthetic
ggaccugaugacugugaau

SEQ ID NO: 11478 - RNA, 19 nt, Artificial Sequence
  Synthetic
guacaaaccaacaggagag

SEQ ID NO: 11479 - RNA, 19 nt, Artificial Sequence
  Synthetic
uggcauacgguucugcaaa

SEQ ID NO: 11480 - RNA, 19 nt, Artificial Sequence
  Synthetic
augccaagucugacaucua

SEQ ID NO: 11481 - RNA, 19 nt, Artificial Sequence
  Synthetic
ccgcugaggagcugaccau

SEQ ID NO: 11482 - RNA, 19 nt, Artificial Sequence
  Synthetic
caggagaguacgugacugu

SEQ ID NO: 11483 - RNA, 19 nt, Artificial Sequence
  Synthetic
caaaccaacaggagaguac

SEQ ID NO: 11484 - RNA, 19 nt, Artificial Sequence
  Synthetic
ggagaaugguggaaagcaa

SEQ ID NO: 11485 - RNA, 19 nt, Artificial Sequence
  Synthetic
ggaaauaugggauguauaa

SEQ ID NO: 11486 - RNA, 19 nt, Artificial Sequence
  Synthetic
gcagauggcuugugcagaa

SEQ ID NO: 11487 - RNA, 19 nt, Artificial Sequence
  Synthetic
gauaaugaguacacagcaa

SEQ ID NO: 11488 - RNA, 19 nt, Artificial Sequence
  Synthetic
ccaacuagcucuauguuua

SEQ ID NO: 11489 - RNA, 19 nt, Artificial Sequence
  Synthetic
cuaaagauccagaggaaca

SEQ ID NO: 11490 - RNA, 19 nt, Artificial Sequence
  Synthetic
ggaaagacagcuugaguga

SEQ ID NO: 11491 - RNA, 19 nt, Artificial Sequence
  Synthetic
cguaauacugaaagaacua

SEQ ID NO: 11492 - RNA, 19 nt, Artificial Sequence
  Synthetic
ggauauauacauagcauga

SEQ ID NO: 11493 - RNA, 19 nt, Artificial Sequence
  Synthetic
aacuaaagauccagaggaa

SEQ ID NO: 11494 - RNA, 19 nt, Artificial Sequence
  Synthetic
gugccuggauccugaaaua

SEQ ID NO: 11495 - RNA, 19 nt, Artificial Sequence
  Synthetic
gcaaagugcugcuuccaaa

SEQ ID NO: 11496 - RNA, 19 nt, Artificial Sequence
  Synthetic
gagcgaugaagguggcaaa

SEQ ID NO: 11497 - RNA, 19 nt, Artificial Sequence
  Synthetic
gggaagucuggauggguua

SEQ ID NO: 11498 - RNA, 19 nt, Artificial Sequence
  Synthetic
gcgacaugauuaaacauua

SEQ ID NO: 11499 - RNA, 19 nt, Artificial Sequence
  Synthetic
agaaaggagagaagaugaa

SEQ ID NO: 11500 - RNA, 19 nt, Artificial Sequence
  Synthetic
gagaaugguggaaagcaaa

SEQ ID NO: 11501 - RNA, 19 nt, Artificial Sequence
  Synthetic
gauaaagaugccugggaga

SEQ ID NO: 11502 - RNA, 19 nt, Artificial Sequence
  Synthetic
ggacauaggacucaaaguu

SEQ ID NO: 11503 - RNA, 19 nt, Artificial Sequence
  Synthetic
aaaaugugcuggaaagaaa

SEQ ID NO: 11504 - RNA, 19 nt, Artificial Sequence
  Synthetic
ggaaauagcgcuggagcuu

SEQ ID NO: 11505 - RNA, 19 nt, Artificial Sequence
  Synthetic
agaaaaggcagaagagaga

SEQ ID NO: 11506 - RNA, 19 nt, Artificial Sequence
  Synthetic
ucaagaaaggagagaagau

SEQ ID NO: 11507 - RNA, 19 nt, Artificial Sequence
  Synthetic
cuaaauuacucaggaagaa

SEQ ID NO: 11508 - RNA, 19 nt, Artificial Sequence
  Synthetic
gaacuauuuaugugagaga

SEQ ID NO: 11509 - RNA, 19 nt, Artificial Sequence
  Synthetic
cagaugagcucuaugacau

SEQ ID NO: 11510 - RNA, 19 nt, Artificial Sequence
  Synthetic
uugcagagggaauggcaua

SEQ ID NO: 11511 - RNA, 19 nt, Artificial Sequence
  Synthetic
guaccaagguggcugugaa

SEQ ID NO: 11512 - RNA, 19 nt, Artificial Sequence
  Synthetic
acucaacaccuuagaaaca

SEQ ID NO: 11513 - RNA, 19 nt, Artificial Sequence
  Synthetic
gcucuaugacauuaugaaa

SEQ ID NO: 11514 - RNA, 19 nt, Artificial Sequence
  Synthetic
aggaagaagaugaggacaa

SEQ ID NO: 11515 - RNA, 19 nt, Artificial Sequence
  Synthetic
cagcaagugaucagagaua

SEQ ID NO: 11516 - RNA, 19 nt, Artificial Sequence
  Synthetic
gcaagugagcagagaguau

SEQ ID NO: 11517 - RNA, 19 nt, Artificial Sequence
  Synthetic
cgaagacgcugaagaagaa

SEQ ID NO: 11518 - RNA, 19 nt, Artificial Sequence
  Synthetic
gugucaaggccuucagaaa

SEQ ID NO: 11519 - RNA, 19 nt, Artificial Sequence
  Synthetic
augcagaaucucaaagaaa

SEQ ID NO: 11520 - RNA, 19 nt, Artificial Sequence
  Synthetic
cugugaagauggagagcuu

SEQ ID NO: 11521 - RNA, 19 nt, Artificial Sequence
  Synthetic
acugaaaguuggagaucau

SEQ ID NO: 11522 - RNA, 19 nt, Artificial Sequence
  Synthetic
cauucaggcugguggaaau

SEQ ID NO: 11523 - RNA, 19 nt, Artificial Sequence
  Synthetic
caggcaaagucauuaauaa

SEQ ID NO: 11524 - RNA, 19 nt, Artificial Sequence
  Synthetic
cugaagaggaagaagauga

SEQ ID NO: 11525 - RNA, 19 nt, Artificial Sequence
  Synthetic
uauuauugguggagauaga

SEQ ID NO: 11526 - RNA, 19 nt, Artificial Sequence
  Synthetic
gagcaaugguucuggagca

SEQ ID NO: 11527 - RNA, 19 nt, Artificial Sequence
  Synthetic
gcaagugaucagagauaau

SEQ ID NO: 11528 - RNA, 19 nt, Artificial Sequence
  Synthetic
ccaccaaacaccaaagauu

SEQ ID NO: 11529 - RNA, 19 nt, Artificial Sequence
  Synthetic
ggacagaagugcccuagaa

SEQ ID NO: 11530 - RNA, 19 nt, Artificial Sequence
  Synthetic
ccugggagcagcugagaaa

SEQ ID NO: 11531 - RNA, 19 nt, Artificial Sequence
  Synthetic
acaaauagcuccauggacu

SEQ ID NO: 11532 - RNA, 19 nt, Artificial Sequence
  Synthetic
ggaggaagccaaaaggaaa

SEQ ID NO: 11533 - RNA, 19 nt, Artificial Sequence
  Synthetic
agucauuaaccaagggaga

SEQ ID NO: 11534 - RNA, 19 nt, Artificial Sequence
  Synthetic
gcuccauggacuuuagaaa

SEQ ID NO: 11535 - RNA, 19 nt, Artificial Sequence
  Synthetic
ccgcgcagcugaugaacua

SEQ ID NO: 11536 - RNA, 19 nt, Artificial Sequence
  Synthetic
gcacaaugggauuugguuu

SEQ ID NO: 11537 - RNA, 19 nt, Artificial Sequence
  Synthetic
ucagcaagauggaaagaau

SEQ ID NO: 11538 - RNA, 19 nt, Artificial Sequence
  Synthetic
gggaaauggccuacacuga

SEQ ID NO: 11539 - RNA, 19 nt, Artificial Sequence
  Synthetic
ggacagaaggugaaaauga

SEQ ID NO: 11540 - RNA, 19 nt, Artificial Sequence
  Synthetic
ccucuuugauaaugaguuu

SEQ ID NO: 11541 - RNA, 19 nt, Artificial Sequence
  Synthetic
ugauggaauuccuguuaaa

SEQ ID NO: 11542 - RNA, 19 nt, Artificial Sequence
  Synthetic
aauaaagauuugcggcauu

SEQ ID NO: 11543 - RNA, 19 nt, Artificial Sequence
  Synthetic
caguagagcuggagagagg

SEQ ID NO: 11544 - RNA, 19 nt, Artificial Sequence
  Synthetic
gggaagaguuggaggacua

SEQ ID NO: 11545 - RNA, 19 nt, Artificial Sequence
  Synthetic
gaauauaccuggaacacaa

SEQ ID NO: 11546 - RNA, 19 nt, Artificial Sequence
  Synthetic
ucaaaaggaugaagagaaa

SEQ ID NO: 11547 - RNA, 19 nt, Artificial Sequence
  Synthetic
ugaaagaaguuaucagaga

SEQ ID NO: 11548 - RNA, 19 nt, Artificial Sequence
  Synthetic
gcaacagagucaggagaaa

SEQ ID NO: 11549 - RNA, 19 nt, Artificial Sequence
  Synthetic
gaaagaaguuaucagagaa

SEQ ID NO: 11550 - RNA, 19 nt, Artificial Sequence
  Synthetic
ggagugugcuuaugggcaa

SEQ ID NO: 11551 - RNA, 19 nt, Artificial Sequence
  Synthetic
ggacagacuggguggccaa

SEQ ID NO: 11552 - RNA, 19 nt, Artificial Sequence
  Synthetic
caagugaggucgaugaaau

SEQ ID NO: 11553 - RNA, 19 nt, Artificial Sequence
  Synthetic
gaaucagucaucagaaaua

SEQ ID NO: 11554 - RNA, 19 nt, Artificial Sequence
  Synthetic
gugacuggccagaaggaua

SEQ ID NO: 11555 - RNA, 19 nt, Artificial Sequence
  Synthetic
uggacuugcaagagaauua

SEQ ID NO: 11556 - RNA, 19 nt, Artificial Sequence
  Synthetic
gggcagaacuugcuuucaa

SEQ ID NO: 11557 - RNA, 19 nt, Artificial Sequence
  Synthetic
acuuauaauccuacagcaa

SEQ ID NO: 11558 - RNA, 19 nt, Artificial Sequence
  Synthetic
caucuuuaguugagguaga

SEQ ID NO: 11559 - RNA, 19 nt, Artificial Sequence
  Synthetic
uaguugagguagagccuaa

SEQ ID NO: 11560 - RNA, 19 nt, Artificial Sequence
  Synthetic
caggaaaucuuggaaguua

SEQ ID NO: 11561 - RNA, 19 nt, Artificial Sequence
  Synthetic
ccagcaaccuccaaagcaa

SEQ ID NO: 11562 - RNA, 19 nt, Artificial Sequence
  Synthetic
ggaccuuaguacuguaaau

SEQ ID NO: 11563 - RNA, 19 nt, Artificial Sequence
  Synthetic
ggauauaaucgaucagguu

SEQ ID NO: 11564 - RNA, 19 nt, Artificial Sequence
  Synthetic
aggaaaucuuggaaguuau

SEQ ID NO: 11565 - RNA, 19 nt, Artificial Sequence
  Synthetic
guccagagcuugugaaaau

SEQ ID NO: 11566 - RNA, 19 nt, Artificial Sequence
  Synthetic
ugacagaaagauugcaauu

SEQ ID NO: 11567 - RNA, 19 nt, Artificial Sequence
  Synthetic
ggacaagugaggucgauga

SEQ ID NO: 11568 - RNA, 19 nt, Artificial Sequence
  Synthetic
cuccaaagcaacagaguca

SEQ ID NO: 11569 - RNA, 19 nt, Artificial Sequence
  Synthetic
guuaccaacugcugagauu

SEQ ID NO: 11570 - RNA, 19 nt, Artificial Sequence
  Synthetic
aaguuaagucucugaagaa

SEQ ID NO: 11571 - RNA, 19 nt, Artificial Sequence
  Synthetic
gagcaaugcaggaaaucuu

SEQ ID NO: 11572 - RNA, 19 nt, Artificial Sequence
  Synthetic
gggagagacuauauuuaau

SEQ ID NO: 11573 - RNA, 19 nt, Artificial Sequence
  Synthetic
caggagaaaccgccacaaa

SEQ ID NO: 11574 - RNA, 19 nt, Artificial Sequence
  Synthetic
gaagaaagcuggaagaauu

SEQ ID NO: 11575 - RNA, 19 nt, Artificial Sequence
  Synthetic
ggucauggccagaaagcua

SEQ ID NO: 11576 - RNA, 19 nt, Artificial Sequence
  Synthetic
ugacaaaggaugaagaaca

SEQ ID NO: 11577 - RNA, 19 nt, Artificial Sequence
  Synthetic
aggcugaauuacagugaaa

SEQ ID NO: 11578 - RNA, 19 nt, Artificial Sequence
  Synthetic
ugggagaacugaaggauga

SEQ ID NO: 11579 - RNA, 19 nt, Artificial Sequence
  Synthetic
ccaaaaugcccaagaagaa

SEQ ID NO: 11580 - RNA, 19 nt, Artificial Sequence
  Synthetic
gcacauggauggagguucu

SEQ ID NO: 11581 - RNA, 19 nt, Artificial Sequence
  Synthetic
gggagaagcacaagaucau

SEQ ID NO: 11582 - RNA, 19 nt, Artificial Sequence
  Synthetic
ggaucaaguccugaagaaa

SEQ ID NO: 11583 - RNA, 19 nt, Artificial Sequence
  Synthetic
guaccaaugcuguuguaaa

SEQ ID NO: 11584 - RNA, 19 nt, Artificial Sequence
  Synthetic
gaucaagcucugugacuuu

SEQ ID NO: 11585 - RNA, 19 nt, Artificial Sequence
  Synthetic
uugaugagcagcagcgaaa

SEQ ID NO: 11586 - RNA, 19 nt, Artificial Sequence
  Synthetic
gaagaauuccugaacaaau

SEQ ID NO: 11587 - RNA, 19 nt, Artificial Sequence
  Synthetic
uggaucaaguccugaagaa

SEQ ID NO: 11588 - RNA, 19 nt, Artificial Sequence
  Synthetic
gagcagauuugaagcaacu

SEQ ID NO: 11589 - RNA, 19 nt, Artificial Sequence
  Synthetic
ugacauaucugagggagaa

SEQ ID NO: 11590 - RNA, 19 nt, Artificial Sequence
  Synthetic
cugacauaucugagggaga

SEQ ID NO: 11591 - RNA, 19 nt, Artificial Sequence
  Synthetic
uaauaaaaggccugacaua

SEQ ID NO: 11592 - RNA, 19 nt, Artificial Sequence
  Synthetic
caacguguauagugccuaa

SEQ ID NO: 11593 - RNA, 19 nt, Artificial Sequence
  Synthetic
cuacaugucgccagaaaga

SEQ ID NO: 11594 - RNA, 19 nt, Artificial Sequence
  Synthetic
gagaucugaugcugaggaa

SEQ ID NO: 11595 - RNA, 19 nt, Artificial Sequence
  Synthetic
gaucugaugcugaggaagu

SEQ ID NO: 11596 - RNA, 19 nt, Artificial Sequence
  Synthetic
augcugaggaaguggauuu

SEQ ID NO: 11597 - RNA, 19 nt, Artificial Sequence
  Synthetic
agaagcagaaggugggaga

SEQ ID NO: 11598 - RNA, 19 nt, Artificial Sequence
  Synthetic
ggugccagguggaaggaga

SEQ ID NO: 11599 - RNA, 19 nt, Artificial Sequence
  Synthetic
ccugaagaaagcuggaaga

SEQ ID NO: 11600 - RNA, 19 nt, Artificial Sequence
  Synthetic
ccgcagagagagcagauuu

SEQ ID NO: 11601 - RNA, 19 nt, Artificial Sequence
  Synthetic
ugaagaaagcuggaagaau

SEQ ID NO: 11602 - RNA, 19 nt, Artificial Sequence
  Synthetic
ccagaaagcuaauucaucu

SEQ ID NO: 11603 - RNA, 19 nt, Artificial Sequence
  Synthetic
ccuccaacauccuagucaa

SEQ ID NO: 11604 - RNA, 19 nt, Artificial Sequence
  Synthetic
cagauauggaugagagauu

SEQ ID NO: 11605 - RNA, 19 nt, Artificial Sequence
  Synthetic
uuagugagaucuagggaua

SEQ ID NO: 11606 - RNA, 19 nt, Artificial Sequence
  Synthetic
cggaugaccuaaagcgauu

SEQ ID NO: 11607 - RNA, 19 nt, Artificial Sequence
  Synthetic
cagaaaugguucagucuau

SEQ ID NO: 11608 - RNA, 19 nt, Artificial Sequence
  Synthetic
cagacgaggucaugaauca

SEQ ID NO: 11609 - RNA, 19 nt, Artificial Sequence
  Synthetic
gcccaggcuugcagaauaa

SEQ ID NO: 11610 - RNA, 19 nt, Artificial Sequence
  Synthetic
gagcuagcauauagaugua

SEQ ID NO: 11611 - RNA, 19 nt, Artificial Sequence
  Synthetic
gcgcagacgaggucaugaa

SEQ ID NO: 11612 - RNA, 19 nt, Artificial Sequence
  Synthetic
gaucagaaucaaacuggua

SEQ ID NO: 11613 - RNA, 19 nt, Artificial Sequence
  Synthetic
agauagagauggaguaccu

SEQ ID NO: 11614 - RNA, 19 nt, Artificial Sequence
  Synthetic
ggaacuugcuccauuguuu

SEQ ID NO: 11615 - RNA, 19 nt, Artificial Sequence
  Synthetic
uggaguaccuguuauuaaa

SEQ ID NO: 11616 - RNA, 19 nt, Artificial Sequence
  Synthetic
cuaaagcgauucuuguaua

SEQ ID NO: 11617 - RNA, 19 nt, Artificial Sequence
  Synthetic
auacuaaagagcuagcaua

SEQ ID NO: 11618 - RNA, 19 nt, Artificial Sequence
  Synthetic
gaaccaggcagcccagaaa

SEQ ID NO: 11619 - RNA, 19 nt, Artificial Sequence
  Synthetic
ggaggaaccugucuuuaaa

SEQ ID NO: 11620 - RNA, 19 nt, Artificial Sequence
  Synthetic
caacagaccaaggaagcaa

SEQ ID NO: 11621 - RNA, 19 nt, Artificial Sequence
  Synthetic
aggaggaaccugucuuuaa

SEQ ID NO: 11622 - RNA, 19 nt, Artificial Sequence
  Synthetic
agauugauccugcgagaga

SEQ ID NO: 11623 - RNA, 19 nt, Artificial Sequence
  Synthetic
cuuuaaagcugucccugaa

SEQ ID NO: 11624 - RNA, 19 nt, Artificial Sequence
  Synthetic
cuguuauuaaaguggcaaa

SEQ ID NO: 11625 - RNA, 19 nt, Artificial Sequence
  Synthetic
uuaaaguggcaaaugacaa

SEQ ID NO: 11626 - RNA, 19 nt, Artificial Sequence
  Synthetic
uguuugaagaacugagaca

SEQ ID NO: 11627 - RNA, 19 nt, Artificial Sequence
  Synthetic
gaaucaaacugguacauug

SEQ ID NO: 11628 - RNA, 19 nt, Artificial Sequence
  Synthetic
uaccuuugguggugaguuu

SEQ ID NO: 11629 - RNA, 19 nt, Artificial Sequence
  Synthetic
ccggaaaucccguaucgua

SEQ ID NO: 11630 - RNA, 19 nt, Artificial Sequence
  Synthetic
gcuagcauauagauguaau

SEQ ID NO: 11631 - RNA, 19 nt, Artificial Sequence
  Synthetic
ggucuuucuuauuuaguga

SEQ ID NO: 11632 - RNA, 19 nt, Artificial Sequence
  Synthetic
aggacuaauugucagccua

SEQ ID NO: 11633 - RNA, 19 nt, Artificial Sequence
  Synthetic
gugcugcucuuuaaugaaa

SEQ ID NO: 11634 - RNA, 19 nt, Artificial Sequence
  Synthetic
ccaaagagcuggaggccau

SEQ ID NO: 11635 - RNA, 19 nt, Artificial Sequence
  Synthetic
ugaaagaggccaagaggau

SEQ ID NO: 11636 - RNA, 19 nt, Artificial Sequence
  Synthetic
gggaagaaggagagccuca

SEQ ID NO: 11637 - RNA, 19 nt, Artificial Sequence
  Synthetic
gagagaagcaccagaucau

SEQ ID NO: 11638 - RNA, 19 nt, Artificial Sequence
  Synthetic
gguccgagguggaagaagu

SEQ ID NO: 11639 - RNA, 19 nt, Artificial Sequence
  Synthetic
ucuuugaacuccuggacua

SEQ ID NO: 11640 - RNA, 19 nt, Artificial Sequence
  Synthetic
aggcaaaccugguggaccu

SEQ ID NO: 11641 - RNA, 19 nt, Artificial Sequence
  Synthetic
ugguggaccugcagaagaa

SEQ ID NO: 11642 - RNA, 19 nt, Artificial Sequence
  Synthetic
agguggaagaaguggauuu

SEQ ID NO: 11643 - RNA, 19 nt, Artificial Sequence
  Synthetic
auaaaugccucaucaagaa

SEQ ID NO: 11644 - RNA, 19 nt, Artificial Sequence
  Synthetic
uccaggaguuugucaauaa

SEQ ID NO: 11645 - RNA, 19 nt, Artificial Sequence
  Synthetic
uggacuauauugugaacga

SEQ ID NO: 11646 - RNA, 19 nt, Artificial Sequence
  Synthetic
ucauagacuccauggccaa

SEQ ID NO: 11647 - RNA, 19 nt, Artificial Sequence
  Synthetic
uggaccaggugcugaaaga

SEQ ID NO: 11648 - RNA, 19 nt, Artificial Sequence
  Synthetic
uggaggagcuggaacuuga

SEQ ID NO: 11649 - RNA, 19 nt, Artificial Sequence
  Synthetic
acgaugacuucgaaaggau

SEQ ID NO: 11650 - RNA, 19 nt, Artificial Sequence
  Synthetic
cgccguacaucgugggcuu

SEQ ID NO: 11651 - RNA, 19 nt, Artificial Sequence
  Synthetic
uugacgagcagcagaagaa

SEQ ID NO: 11652 - RNA, 19 nt, Artificial Sequence
  Synthetic
cgagagaagcaccagauca

SEQ ID NO: 11653 - RNA, 19 nt, Artificial Sequence
  Synthetic
aauaaaugccucaucaaga

SEQ ID NO: 11654 - RNA, 19 nt, Artificial Sequence
  Synthetic
aaggagagccucacagcau

SEQ ID NO: 11655 - RNA, 19 nt, Artificial Sequence
  Synthetic
acucaaagacgaugacuuc

SEQ ID NO: 11656 - RNA, 19 nt, Artificial Sequence
  Synthetic
gaucagcauuugcauggaa

SEQ ID NO: 11657 - RNA, 19 nt, Artificial Sequence
  Synthetic
gcauuugcauggaacacau

SEQ ID NO: 11658 - RNA, 19 nt, Artificial Sequence
  Synthetic
ccaggaguuugucaauaaa

SEQ ID NO: 11659 - RNA, 19 nt, Artificial Sequence
  Synthetic
ccuccaacauccucgugaa

SEQ ID NO: 11660 - RNA, 19 nt, Artificial Sequence
  Synthetic
cagaagaagcggcuggaag

SEQ ID NO: 11661 - RNA, 19 nt, Artificial Sequence
  Synthetic
cgaaaggaucucagagcug

SEQ ID NO: 11662 - RNA, 19 nt, Artificial Sequence
  Synthetic
accugaagaugcucacaaa

SEQ ID NO: 11663 - RNA, 19 nt, Artificial Sequence
  Synthetic
ccaacauccucgugaacuc

SEQ ID NO: 11664 - RNA, 19 nt, Artificial Sequence
  Synthetic
gaagaaggaucuacggaua

SEQ ID NO: 11665 - RNA, 19 nt, Artificial Sequence
  Synthetic
ccgcagagcguaugagcua

SEQ ID NO: 11666 - RNA, 19 nt, Artificial Sequence
  Synthetic
ggaaaauccaagaggaaga

SEQ ID NO: 11667 - RNA, 19 nt, Artificial Sequence
  Synthetic
ggaucaacccagagcugaa

SEQ ID NO: 11668 - RNA, 19 nt, Artificial Sequence
  Synthetic
ugacaauuccagaggacau

SEQ ID NO: 11669 - RNA, 19 nt, Artificial Sequence
  Synthetic
acuuugagguggaggcuga

SEQ ID NO: 11670 - RNA, 19 nt, Artificial Sequence
  Synthetic
acagaaacuuugaggugga

SEQ ID NO: 11671 - RNA, 19 nt, Artificial Sequence
  Synthetic
gggaugaguugugugaaua

SEQ ID NO: 11672 - RNA, 19 nt, Artificial Sequence
  Synthetic
accggaaggugcuggauaa

SEQ ID NO: 11673 - RNA, 19 nt, Artificial Sequence
  Synthetic
uggacaaguucuaccggaa

SEQ ID NO: 11674 - RNA, 19 nt, Artificial Sequence
  Synthetic
cagaagggcuacaauguca

SEQ ID NO: 11675 - RNA, 19 nt, Artificial Sequence
  Synthetic
ggaagaaggaucuacggau

SEQ ID NO: 11676 - RNA, 19 nt, Artificial Sequence
  Synthetic
ucauggaccuggacaucaa

SEQ ID NO: 11677 - RNA, 19 nt, Artificial Sequence
  Synthetic
ugaagcaggugguggagga

SEQ ID NO: 11678 - RNA, 19 nt, Artificial Sequence
  Synthetic
ccaauguccuuaucaacaa

SEQ ID NO: 11679 - RNA, 19 nt, Artificial Sequence
  Synthetic
ccuccaauguccuuaucaa

SEQ ID NO: 11680 - RNA, 19 nt, Artificial Sequence
  Synthetic
ccaaagaagcagaccauug

SEQ ID NO: 11681 - RNA, 19 nt, Artificial Sequence
  Synthetic
acccagagcugaaccagaa

SEQ ID NO: 11682 - RNA, 19 nt, Artificial Sequence
  Synthetic
gggagauugcugugucuau

SEQ ID NO: 11683 - RNA, 19 nt, Artificial Sequence
  Synthetic
gcuacaaugucaaguccga

SEQ ID NO: 11684 - RNA, 19 nt, Artificial Sequence
  Synthetic
ucaccauuggagacagaaa

SEQ ID NO: 11685 - RNA, 19 nt, Artificial Sequence
  Synthetic
aagaaggaucuacggauau

SEQ ID NO: 11686 - RNA, 19 nt, Artificial Sequence
  Synthetic
caucaccauuggagacaga

SEQ ID NO: 11687 - RNA, 19 nt, Artificial Sequence
  Synthetic
cauuggagacagaaacuuu

SEQ ID NO: 11688 - RNA, 19 nt, Artificial Sequence
  Synthetic
agacagaaacuuugaggug

SEQ ID NO: 11689 - RNA, 19 nt, Artificial Sequence
  Synthetic
agcugaaccagaagggcua

SEQ ID NO: 11690 - RNA, 19 nt, Artificial Sequence
  Synthetic
ggaucugcauggagcucau

SEQ ID NO: 11691 - RNA, 19 nt, Artificial Sequence
  Synthetic
ccauccaaguuguauauuu

SEQ ID NO: 11692 - RNA, 19 nt, Artificial Sequence
  Synthetic
ccaagaggaagaaggaucu

SEQ ID NO: 11693 - RNA, 19 nt, Artificial Sequence
  Synthetic
ccgcaguccucuagauuag

SEQ ID NO: 11694 - RNA, 19 nt, Artificial Sequence
  Synthetic
ggacagaaguggaaauauu

SEQ ID NO: 11695 - RNA, 19 nt, Artificial Sequence
  Synthetic
gcaaauaauggcaguuaaa

SEQ ID NO: 11696 - RNA, 19 nt, Artificial Sequence
  Synthetic
cagaagaaauuuuaggcaa

SEQ ID NO: 11697 - RNA, 19 nt, Artificial Sequence
  Synthetic
aagcuaaugugcagggaua

SEQ ID NO: 11698 - RNA, 19 nt, Artificial Sequence
  Synthetic
ggagaauggugcuguuuaa

SEQ ID NO: 11699 - RNA, 19 nt, Artificial Sequence
  Synthetic
ucaaagaggugaacauuaa

SEQ ID NO: 11700 - RNA, 19 nt, Artificial Sequence
  Synthetic
auaaagagcuucugaaaca

SEQ ID NO: 11701 - RNA, 19 nt, Artificial Sequence
  Synthetic
guauaaagagcuucugaaa

SEQ ID NO: 11702 - RNA, 19 nt, Artificial Sequence
  Synthetic
cugcagaggacuugaaaga

SEQ ID NO: 11703 - RNA, 19 nt, Artificial Sequence
  Synthetic
ccauguaugucgauugaua

SEQ ID NO: 11704 - RNA, 19 nt, Artificial Sequence
  Synthetic
ccaaaaggccaaaguauaa

SEQ ID NO: 11705 - RNA, 19 nt, Artificial Sequence
  Synthetic
cuugaaagaccuuggagaa

SEQ ID NO: 11706 - RNA, 19 nt, Artificial Sequence
  Synthetic
ccaaaguggaauaguguau

SEQ ID NO: 11707 - RNA, 19 nt, Artificial Sequence
  Synthetic
ggucaacaguggaugaaaa

SEQ ID NO: 11708 - RNA, 19 nt, Artificial Sequence
  Synthetic
gcacugaaccuuaggcuuu

SEQ ID NO: 11709 - RNA, 19 nt, Artificial Sequence
  Synthetic
guacagaaggcaaaguuua

SEQ ID NO: 11710 - RNA, 19 nt, Artificial Sequence
  Synthetic
gaaagaccuuggagaaauu

SEQ ID NO: 11711 - RNA, 19 nt, Artificial Sequence
  Synthetic
gcugaguaauucugaggaa

SEQ ID NO: 11712 - RNA, 19 nt, Artificial Sequence
  Synthetic
ggaaggacacagugaugaa

SEQ ID NO: 11713 - RNA, 19 nt, Artificial Sequence
  Synthetic
gcauugagucaucaggaaa

SEQ ID NO: 11714 - RNA, 19 nt, Artificial Sequence
  Synthetic
agcaagacguaaagaauuu

SEQ ID NO: 11715 - RNA, 19 nt, Artificial Sequence
  Synthetic
gugcagggauauugccuua

SEQ ID NO: 11716 - RNA, 19 nt, Artificial Sequence
  Synthetic
gcaaagcacugaaguugaa

SEQ ID NO: 11717 - RNA, 19 nt, Artificial Sequence
  Synthetic
ggcaaauaauggcaguuaa

SEQ ID NO: 11718 - RNA, 19 nt, Artificial Sequence
  Synthetic
ccagacaccaugugcaaua

SEQ ID NO: 11719 - RNA, 19 nt, Artificial Sequence
  Synthetic
gaagcaagacguaaagaau

SEQ ID NO: 11720 - RNA, 19 nt, Artificial Sequence
  Synthetic
gggcaaauaauggcaguua

SEQ ID NO: 11721 - RNA, 19 nt, Artificial Sequence
  Synthetic
gcgcaucacgacaaggaua

SEQ ID NO: 11722 - RNA, 19 nt, Artificial Sequence
  Synthetic
gcaaggaguuuauuacaau

SEQ ID NO: 11723 - RNA, 19 nt, Artificial Sequence
  Synthetic
ggaagcaagacguaaagaa

SEQ ID NO: 11724 - RNA, 19 nt, Artificial Sequence
  Synthetic
gcaaguaaauggacaguua

SEQ ID NO: 11725 - RNA, 19 nt, Artificial Sequence
  Synthetic
ggccagagcuagagaugaa

SEQ ID NO: 11726 - RNA, 19 nt, Artificial Sequence
  Synthetic
ggucauacuacuagauauu

SEQ ID NO: 11727 - RNA, 19 nt, Artificial Sequence
  Synthetic
agugagaagugaugaggaa

SEQ ID NO: 11728 - RNA, 19 nt, Artificial Sequence
  Synthetic
gaugaaugaacaagacaua

SEQ ID NO: 11729 - RNA, 19 nt, Artificial Sequence
  Synthetic
acacaagaggacagguuaa

SEQ ID NO: 11730 - RNA, 19 nt, Artificial Sequence
  Synthetic
gaauuuugauggaggacuu

SEQ ID NO: 11731 - RNA, 19 nt, Artificial Sequence
  Synthetic
cugaagaauugaugggcca

SEQ ID NO: 11732 - RNA, 19 nt, Artificial Sequence
  Synthetic
cgaaaacagccaaaagaaa

SEQ ID NO: 11733 - RNA, 19 nt, Artificial Sequence
  Synthetic
caugacagcuugugaugaa

SEQ ID NO: 11734 - RNA, 19 nt, Artificial Sequence
  Synthetic
gugcauuguugaugaggau

SEQ ID NO: 11735 - RNA, 19 nt, Artificial Sequence
  Synthetic
aggcaaugcugucauauua

SEQ ID NO: 11736 - RNA, 19 nt, Artificial Sequence
  Synthetic
ggaaaugcaccaaggagau

SEQ ID NO: 11737 - RNA, 19 nt, Artificial Sequence
  Synthetic
gaagauggugaucgaauua

SEQ ID NO: 11738 - RNA, 19 nt, Artificial Sequence
  Synthetic
agaugaagauggugaucga

SEQ ID NO: 11739 - RNA, 19 nt, Artificial Sequence
  Synthetic
cagguuaagcugugugauu

SEQ ID NO: 11740 - RNA, 19 nt, Artificial Sequence
  Synthetic
ccuccaauaugcuaguaaa

SEQ ID NO: 11741 - RNA, 19 nt, Artificial Sequence
  Synthetic
uuuaauagccucacacuaa

SEQ ID NO: 11742 - RNA, 19 nt, Artificial Sequence
  Synthetic
gcacagucuacaaagcaua

SEQ ID NO: 11743 - RNA, 19 nt, Artificial Sequence
  Synthetic
ugaacaagacauacgauau

SEQ ID NO: 11744 - RNA, 19 nt, Artificial Sequence
  Synthetic
gaaugaugagggaaauuua

SEQ ID NO: 11745 - RNA, 19 nt, Artificial Sequence
  Synthetic
gcacucagcuggugaauuc

SEQ ID NO: 11746 - RNA, 19 nt, Artificial Sequence
  Synthetic
uggaagaauugcaguagca

SEQ ID NO: 11747 - RNA, 19 nt, Artificial Sequence
  Synthetic
caacuacagcauuugaaua

SEQ ID NO: 11748 - RNA, 19 nt, Artificial Sequence
  Synthetic
guauuaaugcuuugugaca

SEQ ID NO: 11749 - RNA, 19 nt, Artificial Sequence
  Synthetic
guaauggaacagcaaguaa

SEQ ID NO: 11750 - RNA, 19 nt, Artificial Sequence
  Synthetic
ugaagauggugaucgaauu

SEQ ID NO: 11751 - RNA, 19 nt, Artificial Sequence
  Synthetic
agaacauguccuuggaaga

SEQ ID NO: 11752 - RNA, 19 nt, Artificial Sequence
  Synthetic
gcuuauauggcgccugaaa

SEQ ID NO: 11753 - RNA, 19 nt, Artificial Sequence
  Synthetic
gcaaauaaacgaagucauc

SEQ ID NO: 11754 - RNA, 19 nt, Artificial Sequence
  Synthetic
aaugaaagguagugaguaa

SEQ ID NO: 11755 - RNA, 19 nt, Artificial Sequence
  Synthetic
gaauaaacccagagcucaa

SEQ ID NO: 11756 - RNA, 19 nt, Artificial Sequence
  Synthetic
cugcaucggucaagagaaa

SEQ ID NO: 11757 - RNA, 19 nt, Artificial Sequence
  Synthetic
ggauacaucacuagauaaa

SEQ ID NO: 11758 - RNA, 19 nt, Artificial Sequence
  Synthetic
ggaaauaaugggaaagguu

SEQ ID NO: 11759 - RNA, 19 nt, Artificial Sequence
  Synthetic
caucaaugcucucggucaa

SEQ ID NO: 11760 - RNA, 19 nt, Artificial Sequence
  Synthetic
cuacauacccagagcuaau

SEQ ID NO: 11761 - RNA, 19 nt, Artificial Sequence
  Synthetic
gggaaagguugaauuaauu

SEQ ID NO: 11762 - RNA, 19 nt, Artificial Sequence
  Synthetic
cuacaugaauccaaaggaa

SEQ ID NO: 11763 - RNA, 19 nt, Artificial Sequence
  Synthetic
gaaguaauugacagggaaa

SEQ ID NO: 11764 - RNA, 19 nt, Artificial Sequence
  Synthetic
agacaauuccagaggacau

SEQ ID NO: 11765 - RNA, 19 nt, Artificial Sequence
  Synthetic
ugggaaagguugaauuaau

SEQ ID NO: 11766 - RNA, 19 nt, Artificial Sequence
  Synthetic
gaacagaggguuuugauuu

SEQ ID NO: 11767 - RNA, 19 nt, Artificial Sequence
  Synthetic
guucugaggagcugauaua

SEQ ID NO: 11768 - RNA, 19 nt, Artificial Sequence
  Synthetic
cagaagggauacaguguga

SEQ ID NO: 11769 - RNA, 19 nt, Artificial Sequence
  Synthetic
ucauagaagggcuagaaua

SEQ ID NO: 11770 - RNA, 19 nt, Artificial Sequence
  Synthetic
gagcaucucuguuugguaa

SEQ ID NO: 11771 - RNA, 19 nt, Artificial Sequence
  Synthetic
acugauucuuggagacuaa

SEQ ID NO: 11772 - RNA, 19 nt, Artificial Sequence
  Synthetic
cgguagugaugaaauuaua

SEQ ID NO: 11773 - RNA, 19 nt, Artificial Sequence
  Synthetic
gagcugauauacuuggaaa

SEQ ID NO: 11774 - RNA, 19 nt, Artificial Sequence
  Synthetic
cagaugaccuggagccuau

SEQ ID NO: 11775 - RNA, 19 nt, Artificial Sequence
  Synthetic
ucacagugcuuaaagaaga

SEQ ID NO: 11776 - RNA, 19 nt, Artificial Sequence
  Synthetic
caguaaauagccaggaaca

SEQ ID NO: 11777 - RNA, 19 nt, Artificial Sequence
  Synthetic
gcucauggauacaucacua

SEQ ID NO: 11778 - RNA, 19 nt, Artificial Sequence
  Synthetic
caagugaagaugugcgauu

SEQ ID NO: 11779 - RNA, 19 nt, Artificial Sequence
  Synthetic
uauaacagcucaaagagua

SEQ ID NO: 11780 - RNA, 19 nt, Artificial Sequence
  Synthetic
gaucaaggagugaaguaau

SEQ ID NO: 11781 - RNA, 19 nt, Artificial Sequence
  Synthetic
cugcagaguuuguugacuu

SEQ ID NO: 11782 - RNA, 19 nt, Artificial Sequence
  Synthetic
cagcaucaauagaaaguca

SEQ ID NO: 11783 - RNA, 19 nt, Artificial Sequence
  Synthetic
gcugauauacuuggaaaua

SEQ ID NO: 11784 - RNA, 19 nt, Artificial Sequence
  Synthetic
ggaacaaggaggagaacaa

SEQ ID NO: 11785 - RNA, 19 nt, Artificial Sequence
  Synthetic
ggaagagaccaaaguauaa

SEQ ID NO: 11786 - RNA, 19 nt, Artificial Sequence
  Synthetic
aggaagagaccaaaguaua

SEQ ID NO: 11787 - RNA, 19 nt, Artificial Sequence
  Synthetic
gaucacaggaagagaccaa

SEQ ID NO: 11788 - RNA, 19 nt, Artificial Sequence
  Synthetic
acaacuaggugaacacaua

SEQ ID NO: 11789 - RNA, 19 nt, Artificial Sequence
  Synthetic
gcauugagauugaccagaa

SEQ ID NO: 11790 - RNA, 19 nt, Artificial Sequence
  Synthetic
aagcaaagcugaagcagga

SEQ ID NO: 11791 - RNA, 19 nt, Artificial Sequence
  Synthetic
uguacuaccugaaggagaa

SEQ ID NO: 11792 - RNA, 19 nt, Artificial Sequence
  Synthetic
acuaaagaucacaggaaga

SEQ ID NO: 11793 - RNA, 19 nt, Artificial Sequence
  Synthetic
ucaacgaccuggagaacuu

SEQ ID NO: 11794 - RNA, 19 nt, Artificial Sequence
  Synthetic
ccgggaacaaggaggagaa

SEQ ID NO: 11795 - RNA, 19 nt, Artificial Sequence
  Synthetic
caggaagagaccaaaguau

SEQ ID NO: 11796 - RNA, 19 nt, Artificial Sequence
  Synthetic
ccaccaagccggacuauga

SEQ ID NO: 11797 - RNA, 19 nt, Artificial Sequence
  Synthetic
ucaugaagcagacgggcua

SEQ ID NO: 11798 - RNA, 19 nt, Artificial Sequence
  Synthetic
uaacugagagaacgagaaa

SEQ ID NO: 11799 - RNA, 19 nt, Artificial Sequence
  Synthetic
cauggagagcauugagauu

SEQ ID NO: 11800 - RNA, 19 nt, Artificial Sequence
  Synthetic
ucaaggaugucauggcgaa

SEQ ID NO: 11801 - RNA, 19 nt, Artificial Sequence
  Synthetic
uggagagcauugagauuga

SEQ ID NO: 11802 - RNA, 19 nt, Artificial Sequence
  Synthetic
uuacuaaagaucacaggaa

SEQ ID NO: 11803 - RNA, 19 nt, Artificial Sequence
  Synthetic
accagaagcugcaggagau

SEQ ID NO: 11804 - RNA, 19 nt, Artificial Sequence
  Synthetic
aaaucaacgaccuggagaa

SEQ ID NO: 11805 - RNA, 19 nt, Artificial Sequence
  Synthetic
gaccagaagcugcaggaga

SEQ ID NO: 11806 - RNA, 19 nt, Artificial Sequence
  Synthetic
gcaagaugacaguggcgau

SEQ ID NO: 11807 - RNA, 19 nt, Artificial Sequence
  Synthetic
ggccaaggaggguggauca

SEQ ID NO: 11808 - RNA, 19 nt, Artificial Sequence
  Synthetic
ccaacauccugcuggacga

SEQ ID NO: 11809 - RNA, 19 nt, Artificial Sequence
  Synthetic
gcuaccaggcagaaaucaa

SEQ ID NO: 11810 - RNA, 19 nt, Artificial Sequence
  Synthetic
cuggagaacuugggcgaga

SEQ ID NO: 11811 - RNA, 19 nt, Artificial Sequence
  Synthetic
ggugaaacccugucugcau

SEQ ID NO: 11812 - RNA, 19 nt, Artificial Sequence
  Synthetic
gcucaugccuguaauuuca

SEQ ID NO: 11813 - RNA, 19 nt, Artificial Sequence
  Synthetic
ucaaagacugccuuacuaa

SEQ ID NO: 11814 - RNA, 19 nt, Artificial Sequence
  Synthetic
gcugaaaggucaacagaua

SEQ ID NO: 11815 - RNA, 19 nt, Artificial Sequence
  Synthetic
gcagaagaguguagaagaa

SEQ ID NO: 11816 - RNA, 19 nt, Artificial Sequence
  Synthetic
cauaaaggaugaagaggaa

SEQ ID NO: 11817 - RNA, 19 nt, Artificial Sequence
  Synthetic
cuacaaagaugaugugaau

SEQ ID NO: 11818 - RNA, 19 nt, Artificial Sequence
  Synthetic
agaagaagcuuuagcaauu

SEQ ID NO: 11819 - RNA, 19 nt, Artificial Sequence
  Synthetic
gauggaagcugaagaagaa

SEQ ID NO: 11820 - RNA, 19 nt, Artificial Sequence
  Synthetic
agaaauggcuugugcaaaa

SEQ ID NO: 11821 - RNA, 19 nt, Artificial Sequence
  Synthetic
gaagaguguagaagaaaua

SEQ ID NO: 11822 - RNA, 19 nt, Artificial Sequence
  Synthetic
gcaagaagaaguaguagaa

SEQ ID NO: 11823 - RNA, 19 nt, Artificial Sequence
  Synthetic
caggagaguuucagggaca

SEQ ID NO: 11824 - RNA, 19 nt, Artificial Sequence
  Synthetic
gcauaaaggaugaagagga

SEQ ID NO: 11825 - RNA, 19 nt, Artificial Sequence
  Synthetic
ggaugaucguccagaggaa

SEQ ID NO: 11826 - RNA, 19 nt, Artificial Sequence
  Synthetic
acuaagaggucaacaguau

SEQ ID NO: 11827 - RNA, 19 nt, Artificial Sequence
  Synthetic
gggcaugcuugaugaagaa

SEQ ID NO: 11828 - RNA, 19 nt, Artificial Sequence
  Synthetic
gaaggaaucaagagagcaa

SEQ ID NO: 11829 - RNA, 19 nt, Artificial Sequence
  Synthetic
ggcaguuggcagagaaaua

SEQ ID NO: 11830 - RNA, 19 nt, Artificial Sequence
  Synthetic
gaaucaaacuucagagacu

SEQ ID NO: 11831 - RNA, 19 nt, Artificial Sequence
  Synthetic
auuuugagguugagaguuu

SEQ ID NO: 11832 - RNA, 19 nt, Artificial Sequence
  Synthetic
gaacgaaugaucagggaga

SEQ ID NO: 11833 - RNA, 19 nt, Artificial Sequence
  Synthetic
ccauauagcccugaggaaa

SEQ ID NO: 11834 - RNA, 19 nt, Artificial Sequence
  Synthetic
gagauggagaauaaagaaa

SEQ ID NO: 11835 - RNA, 19 nt, Artificial Sequence
  Synthetic
ggaaaaggauuaugugcua

SEQ ID NO: 11836 - RNA, 19 nt, Artificial Sequence
  Synthetic
ggacagaccuccaucaaga

SEQ ID NO: 11837 - RNA, 19 nt, Artificial Sequence
  Synthetic
agaguuuguuccagaaaua

SEQ ID NO: 11838 - RNA, 19 nt, Artificial Sequence
  Synthetic
aggcguagcucaaggauca

SEQ ID NO: 11839 - RNA, 19 nt, Artificial Sequence
  Synthetic
gucgugagauggagaauaa

SEQ ID NO: 11840 - RNA, 19 nt, Artificial Sequence
  Synthetic
agggagaaacugaaggcaa

SEQ ID NO: 11841 - RNA, 19 nt, Artificial Sequence
  Synthetic
gggagaaacugaaggcaac

SEQ ID NO: 11842 - RNA, 19 nt, Artificial Sequence
  Synthetic
ugaagaagaagaagcuuua

SEQ ID NO: 11843 - RNA, 19 nt, Artificial Sequence
  Synthetic
aaacacaucuucugagcaa

SEQ ID NO: 11844 - RNA, 19 nt, Artificial Sequence
  Synthetic
ucaaugagauggaggaguu

SEQ ID NO: 11845 - RNA, 19 nt, Artificial Sequence
  Synthetic
ccucuggcuuugagcauaa

SEQ ID NO: 11846 - RNA, 19 nt, Artificial Sequence
  Synthetic
gcgaggagguggcagucaa

SEQ ID NO: 11847 - RNA, 19 nt, Artificial Sequence
  Synthetic
acuggaagcuggagauuca

SEQ ID NO: 11848 - RNA, 19 nt, Artificial Sequence
  Synthetic
caguggaggaagugggaca

SEQ ID NO: 11849 - RNA, 19 nt, Artificial Sequence
  Synthetic
cagcagcaguggaggaagu

SEQ ID NO: 11850 - RNA, 19 nt, Artificial Sequence
  Synthetic
cuggauaagcggaaaggau

SEQ ID NO: 11851 - RNA, 19 nt, Artificial Sequence
  Synthetic
gcacauguuugaugaccuu

SEQ ID NO: 11852 - RNA, 19 nt, Artificial Sequence
  Synthetic
uggcagaacgugagaugga

SEQ ID NO: 11853 - RNA, 19 nt, Artificial Sequence
  Synthetic
ucgcagacacggugcucaa

SEQ ID NO: 11854 - RNA, 19 nt, Artificial Sequence
  Synthetic
ggaagcaaacaguggucau

SEQ ID NO: 11855 - RNA, 19 nt, Artificial Sequence
  Synthetic
ggaccaaggagaaggagcu

SEQ ID NO: 11856 - RNA, 19 nt, Artificial Sequence
  Synthetic
ggaccgcgguguucgacua

SEQ ID NO: 11857 - RNA, 19 nt, Artificial Sequence
  Synthetic
ugaacuaccuacacaauga

SEQ ID NO: 11858 - RNA, 19 nt, Artificial Sequence
  Synthetic
ggaggagaggagaggcuga

SEQ ID NO: 11859 - RNA, 19 nt, Artificial Sequence
  Synthetic
gcaugaacuaccuacacaa

SEQ ID NO: 11860 - RNA, 19 nt, Artificial Sequence
  Synthetic
ggcaagaagaagggacgaa

SEQ ID NO: 11861 - RNA, 19 nt, Artificial Sequence
  Synthetic
ggcuugaagucaucgaaca

SEQ ID NO: 11862 - RNA, 19 nt, Artificial Sequence
  Synthetic
gcagaacgugagauggaca

SEQ ID NO: 11863 - RNA, 19 nt, Artificial Sequence
  Synthetic
agcaaacaguggucaucaa

SEQ ID NO: 11864 - RNA, 19 nt, Artificial Sequence
  Synthetic
aggaguucgcggaggcaga

SEQ ID NO: 11865 - RNA, 19 nt, Artificial Sequence
  Synthetic
cacaagaccaccaagauga

SEQ ID NO: 11866 - RNA, 19 nt, Artificial Sequence
  Synthetic
gcacaagaccaccaagaug

SEQ ID NO: 11867 - RNA, 19 nt, Artificial Sequence
  Synthetic
ccacacugcuggacaugga

SEQ ID NO: 11868 - RNA, 19 nt, Artificial Sequence
  Synthetic
gagaaggacccggcaguga

SEQ ID NO: 11869 - RNA, 19 nt, Artificial Sequence
  Synthetic
gcagugaugucuggagcuu

SEQ ID NO: 11870 - RNA, 19 nt, Artificial Sequence
  Synthetic
cguauggcguggcuaugaa

SEQ ID NO: 11871 - RNA, 19 nt, Artificial Sequence
  Synthetic
ggaggaagugggacaugga

SEQ ID NO: 11872 - RNA, 19 nt, Artificial Sequence
  Synthetic
gcuccacccugcagaagga

SEQ ID NO: 11873 - RNA, 19 nt, Artificial Sequence
  Synthetic
gaggagaggagaggcugaa

SEQ ID NO: 11874 - RNA, 19 nt, Artificial Sequence
  Synthetic
cuccaaaggcagcggguua

SEQ ID NO: 11875 - RNA, 19 nt, Artificial Sequence
  Synthetic
gcacagguccuacgggaaa

SEQ ID NO: 11876 - RNA, 19 nt, Artificial Sequence
  Synthetic
gugacgacauggagcacaa

SEQ ID NO: 11877 - RNA, 19 nt, Artificial Sequence
  Synthetic
ggccuugaccggaggagaa

SEQ ID NO: 11878 - RNA, 19 nt, Artificial Sequence
  Synthetic
gcagauugcccgugggaug

SEQ ID NO: 11879 - RNA, 19 nt, Artificial Sequence
  Synthetic
gggcacagaccaaagacau

SEQ ID NO: 11880 - RNA, 19 nt, Artificial Sequence
  Synthetic
cuggauggcuccugagguu

SEQ ID NO: 11881 - RNA, 19 nt, Artificial Sequence
  Synthetic
cagaaugggaggagaaggu

SEQ ID NO: 11882 - RNA, 19 nt, Artificial Sequence
  Synthetic
ggagaaacgucuucgaggu

SEQ ID NO: 11883 - RNA, 19 nt, Artificial Sequence
  Synthetic
cacaagacccugaagauca

SEQ ID NO: 11884 - RNA, 19 nt, Artificial Sequence
  Synthetic
agugggagcuagagguguu

SEQ ID NO: 11885 - RNA, 19 nt, Artificial Sequence
  Synthetic
gcagugacgucuggaguuu

SEQ ID NO: 11886 - RNA, 19 nt, Artificial Sequence
  Synthetic
gaggugagcugguggcugu

SEQ ID NO: 11887 - RNA, 19 nt, Artificial Sequence
  Synthetic
ggacgaagccacaugguac

SEQ ID NO: 11888 - RNA, 19 nt, Artificial Sequence
  Synthetic
ccgcauggacgaagccaca

SEQ ID NO: 11889 - RNA, 19 nt, Artificial Sequence
  Synthetic
ccucuagggucauggaaug

SEQ ID NO: 11890 - RNA, 19 nt, Artificial Sequence
  Synthetic
gaucggcauuggaggcuuu

SEQ ID NO: 11891 - RNA, 19 nt, Artificial Sequence
  Synthetic
uggaggaggugaucggcau

SEQ ID NO: 11892 - RNA, 19 nt, Artificial Sequence
  Synthetic
acacuacacugcacaggaa

SEQ ID NO: 11893 - RNA, 19 nt, Artificial Sequence
  Synthetic
gaucucaaguccaacaaca

SEQ ID NO: 11894 - RNA, 19 nt, Artificial Sequence
  Synthetic
gcauuggaggcuuuggcaa

SEQ ID NO: 11895 - RNA, 19 nt, Artificial Sequence
  Synthetic
ccacaugguaccuggauuc

SEQ ID NO: 11896 - RNA, 19 nt, Artificial Sequence
  Synthetic
ccuauggcguagcuguuaa

SEQ ID NO: 11897 - RNA, 19 nt, Artificial Sequence
  Synthetic
gcacaaaaccacacaaaug

SEQ ID NO: 11898 - RNA, 19 nt, Artificial Sequence
  Synthetic
ggauggcuccugagguuau

SEQ ID NO: 11899 - RNA, 19 nt, Artificial Sequence
  Synthetic
ccauugagagugacgacau

SEQ ID NO: 11900 - RNA, 19 nt, Artificial Sequence
  Synthetic
gagcugcgagccaaggaaa

SEQ ID NO: 11901 - RNA, 19 nt, Artificial Sequence
  Synthetic
uaggaggagucacagcaua

SEQ ID NO: 11902 - RNA, 19 nt, Artificial Sequence
  Synthetic
gagcacaagacccugaaga

SEQ ID NO: 11903 - RNA, 19 nt, Artificial Sequence
  Synthetic
gaagccaaauaaacucaaa

SEQ ID NO: 11904 - RNA, 19 nt, Artificial Sequence
  Synthetic
ccuuguacauagagaaaua

SEQ ID NO: 11905 - RNA, 19 nt, Artificial Sequence
  Synthetic
cggaagaggaggaaggaga

SEQ ID NO: 11906 - RNA, 19 nt, Artificial Sequence
  Synthetic
ccaugaaccuggaggacca

SEQ ID NO: 11907 - RNA, 19 nt, Artificial Sequence
  Synthetic
gugcgagaccucaaagaaa

SEQ ID NO: 11908 - RNA, 19 nt, Artificial Sequence
  Synthetic
ucaaagaaaccgacaucaa

SEQ ID NO: 11909 - RNA, 19 nt, Artificial Sequence
  Synthetic
gcaacaaggcaauagaaaa

SEQ ID NO: 11910 - RNA, 19 nt, Artificial Sequence
  Synthetic
uggagaagcuuaucaagaa

SEQ ID NO: 11911 - RNA, 19 nt, Artificial Sequence
  Synthetic
aaggagagguagacaguga

SEQ ID NO: 11912 - RNA, 19 nt, Artificial Sequence
  Synthetic
agagguagacagugaagua

SEQ ID NO: 11913 - RNA, 19 nt, Artificial Sequence
  Synthetic
gagaaggaccugacgccua

SEQ ID NO: 11914 - RNA, 19 nt, Artificial Sequence
  Synthetic
gcaaugaaccugugucuga

SEQ ID NO: 11915 - RNA, 19 nt, Artificial Sequence
  Synthetic
gggaggagguggcugugaa

SEQ ID NO: 11916 - RNA, 19 nt, Artificial Sequence
  Synthetic
gccacauaaucaacagaaa

SEQ ID NO: 11917 - RNA, 19 nt, Artificial Sequence
  Synthetic
ggacauugccucagcugau

SEQ ID NO: 11918 - RNA, 19 nt, Artificial Sequence
  Synthetic
agaggaggaaggagaggua

SEQ ID NO: 11919 - RNA, 19 nt, Artificial Sequence
  Synthetic
aggagguggcugugaagaa

SEQ ID NO: 11920 - RNA, 19 nt, Artificial Sequence
  Synthetic
acacaauggagaagcuuau

SEQ ID NO: 11921 - RNA, 19 nt, Artificial Sequence
  Synthetic
ccacagggaucucaaguca

SEQ ID NO: 11922 - RNA, 19 nt, Artificial Sequence
  Synthetic
aggaggaaggagagguaga

SEQ ID NO: 11923 - RNA, 19 nt, Artificial Sequence
  Synthetic
ucugggaacuggaagggaa

SEQ ID NO: 11924 - RNA, 19 nt, Artificial Sequence
  Synthetic
cugugaagaaggugcgaga

SEQ ID NO: 11925 - RNA, 19 nt, Artificial Sequence
  Synthetic
gaccaauucaccugauaaa

SEQ ID NO: 11926 - RNA, 19 nt, Artificial Sequence
  Synthetic
gaaguagagcugacaucaa

SEQ ID NO: 11927 - RNA, 19 nt, Artificial Sequence
  Synthetic
cuuccaaggagcugaguga

SEQ ID NO: 11928 - RNA, 19 nt, Artificial Sequence
  Synthetic
caugaaagccacucguauu

SEQ ID NO: 11929 - RNA, 19 nt, Artificial Sequence
  Synthetic
ccaacaugcuaaucaccua

SEQ ID NO: 11930 - RNA, 19 nt, Artificial Sequence
  Synthetic
ccuacgacgauguggugaa

SEQ ID NO: 11931 - RNA, 19 nt, Artificial Sequence
  Synthetic
acgacgauguggugaagau

SEQ ID NO: 11932 - RNA, 19 nt, Artificial Sequence
  Synthetic
auggaaacacaauggagaa

SEQ ID NO: 11933 - RNA, 19 nt, Artificial Sequence
  Synthetic
gagcugacaucaagccaga

SEQ ID NO: 11934 - RNA, 19 nt, Artificial Sequence
  Synthetic
gaacagaaugagacggaua

SEQ ID NO: 11935 - RNA, 19 nt, Artificial Sequence
  Synthetic
ggaaguagauagugaaguu

SEQ ID NO: 11936 - RNA, 19 nt, Artificial Sequence
  Synthetic
ggagagagcacaagcggaa

SEQ ID NO: 11937 - RNA, 19 nt, Artificial Sequence
  Synthetic
aaacaguccugaugaguua

SEQ ID NO: 11938 - RNA, 19 nt, Artificial Sequence
  Synthetic
cggaagagguggccaucaa

SEQ ID NO: 11939 - RNA, 19 nt, Artificial Sequence
  Synthetic
aagcggaacugaagacaua

SEQ ID NO: 11940 - RNA, 19 nt, Artificial Sequence
  Synthetic
cugauggagaagagggaaa

SEQ ID NO: 11941 - RNA, 19 nt, Artificial Sequence
  Synthetic
cugaagaucucgugacuau

SEQ ID NO: 11942 - RNA, 19 nt, Artificial Sequence
  Synthetic
ccaucaagaaagugagaga

SEQ ID NO: 11943 - RNA, 19 nt, Artificial Sequence
  Synthetic
uauaugagauagagagaca

SEQ ID NO: 11944 - RNA, 19 nt, Artificial Sequence
  Synthetic
gaacaugagacuucgcaaa

SEQ ID NO: 11945 - RNA, 19 nt, Artificial Sequence
  Synthetic
gggagaaggagcucauuaa

SEQ ID NO: 11946 - RNA, 19 nt, Artificial Sequence
  Synthetic
gaucaaaagugaaggaacu

SEQ ID NO: 11947 - RNA, 19 nt, Artificial Sequence
  Synthetic
cuagaaaugagcugcaaua

SEQ ID NO: 11948 - RNA, 19 nt, Artificial Sequence
  Synthetic
cugcaaagagugaacuaua

SEQ ID NO: 11949 - RNA, 19 nt, Artificial Sequence
  Synthetic
ugagauagagagacaauaa

SEQ ID NO: 11950 - RNA, 19 nt, Artificial Sequence
  Synthetic
gagccgauaucgaagcaaa

SEQ ID NO: 11951 - RNA, 19 nt, Artificial Sequence
  Synthetic
gaguaaaccucgaaaccga

SEQ ID NO: 11952 - RNA, 19 nt, Artificial Sequence
  Synthetic
gcaaaucucuggaaaauaa

SEQ ID NO: 11953 - RNA, 19 nt, Artificial Sequence
  Synthetic
gcuuaaggccuguauggaa

SEQ ID NO: 11954 - RNA, 19 nt, Artificial Sequence
  Synthetic
gcaccaagcucaaucccaa

SEQ ID NO: 11955 - RNA, 19 nt, Artificial Sequence
  Synthetic
gaaaugagcugcaauaaca

SEQ ID NO: 11956 - RNA, 19 nt, Artificial Sequence
  Synthetic
aaacaaggccucugcagaa

SEQ ID NO: 11957 - RNA, 19 nt, Artificial Sequence
  Synthetic
ggauauucgugaacacuau

SEQ ID NO: 11958 - RNA, 19 nt, Artificial Sequence
  Synthetic
aaacagacguggcagagua

SEQ ID NO: 11959 - RNA, 19 nt, Artificial Sequence
  Synthetic
cugaugaguuagcugauaa

SEQ ID NO: 11960 - RNA, 19 nt, Artificial Sequence
  Synthetic
cugagaaaacggaagaaaa

SEQ ID NO: 11961 - RNA, 19 nt, Artificial Sequence
  Synthetic
gcaacacgguggacggaga

SEQ ID NO: 11962 - RNA, 19 nt, Artificial Sequence
  Synthetic
auggagagaagaagugaaa

SEQ ID NO: 11963 - RNA, 19 nt, Artificial Sequence
  Synthetic
gcaaagagugaacuauaua

SEQ ID NO: 11964 - RNA, 19 nt, Artificial Sequence
  Synthetic
ggaagaaacggaagaagaa

SEQ ID NO: 11965 - RNA, 19 nt, Artificial Sequence
  Synthetic
cggaagaagaagagcucaa

SEQ ID NO: 11966 - RNA, 19 nt, Artificial Sequence
  Synthetic
cggaagaaacggaagaaga

SEQ ID NO: 11967 - RNA, 19 nt, Artificial Sequence
  Synthetic
ucucaaagcucgcgggaca

SEQ ID NO: 11968 - RNA, 19 nt, Artificial Sequence
  Synthetic
gaccaaagaagguguguaa

SEQ ID NO: 11969 - RNA, 19 nt, Artificial Sequence
  Synthetic
ggaaagcagcagagagaga

SEQ ID NO: 11970 - RNA, 19 nt, Artificial Sequence
  Synthetic
cagcaaagcccggaagaaa

SEQ ID NO: 11971 - RNA, 19 nt, Artificial Sequence
  Synthetic
gggaaagcgucgcagcaaa

SEQ ID NO: 11972 - RNA, 19 nt, Artificial Sequence
  Synthetic
ggaaccaggccuugggcaa

SEQ ID NO: 11973 - RNA, 19 nt, Artificial Sequence
  Synthetic
aaggaaagcagcagagaga

SEQ ID NO: 11974 - RNA, 19 nt, Artificial Sequence
  Synthetic
gggagaauauaaagaacca

SEQ ID NO: 11975 - RNA, 19 nt, Artificial Sequence
  Synthetic
gcucaaagucccuggcuca

SEQ ID NO: 11976 - RNA, 19 nt, Artificial Sequence
  Synthetic
gaggauguuuggaggauga

SEQ ID NO: 11977 - RNA, 19 nt, Artificial Sequence
  Synthetic
gcagcuggaaauagaauua

SEQ ID NO: 11978 - RNA, 19 nt, Artificial Sequence
  Synthetic
gaucagaacuccacaaacu

SEQ ID NO: 11979 - RNA, 19 nt, Artificial Sequence
  Synthetic
cggaugacagugagaagaa

SEQ ID NO: 11980 - RNA, 19 nt, Artificial Sequence
  Synthetic
ggugaugacaaauguuaaa

SEQ ID NO: 11981 - RNA, 19 nt, Artificial Sequence
  Synthetic
aguuuucuguggaggaaua

SEQ ID NO: 11982 - RNA, 19 nt, Artificial Sequence
  Synthetic
ggucaaagugggagacauc

SEQ ID NO: 11983 - RNA, 19 nt, Artificial Sequence
  Synthetic
uggaggagcaggagcaaau

SEQ ID NO: 11984 - RNA, 19 nt, Artificial Sequence
  Synthetic
ccaaagaagguguguaagu

SEQ ID NO: 11985 - RNA, 19 nt, Artificial Sequence
  Synthetic
gugugaaaguccaaauaca

SEQ ID NO: 11986 - RNA, 19 nt, Artificial Sequence
  Synthetic
gcacgaugcugcccugaaa

SEQ ID NO: 11987 - RNA, 19 nt, Artificial Sequence
  Synthetic
gagagugucaaguguguaa

SEQ ID NO: 11988 - RNA, 19 nt, Artificial Sequence
  Synthetic
gagucuggguuguagagaa

SEQ ID NO: 11989 - RNA, 19 nt, Artificial Sequence
  Synthetic
aacucaagccaguggauua

SEQ ID NO: 11990 - RNA, 19 nt, Artificial Sequence
  Synthetic
gaagggugaugcaggauau

SEQ ID NO: 11991 - RNA, 19 nt, Artificial Sequence
  Synthetic
gagaacucuuuguaagcaa

SEQ ID NO: 11992 - RNA, 19 nt, Artificial Sequence
  Synthetic
cgccaaaucaagccaauua

SEQ ID NO: 11993 - RNA, 19 nt, Artificial Sequence
  Synthetic
ccucaaaccucuuccagau

SEQ ID NO: 11994 - RNA, 19 nt, Artificial Sequence
  Synthetic
cuguaaaccuugagggaua

SEQ ID NO: 11995 - RNA, 19 nt, Artificial Sequence
  Synthetic
gcaaauauccugcgagauu

SEQ ID NO: 11996 - RNA, 19 nt, Artificial Sequence
  Synthetic
cgucaaacuaggagauuuu

SEQ ID NO: 11997 - RNA, 19 nt, Artificial Sequence
  Synthetic
gagaaugugacuaggaaau

SEQ ID NO: 11998 - RNA, 19 nt, Artificial Sequence
  Synthetic
gaucauuccuuaagcacua

SEQ ID NO: 11999 - RNA, 19 nt, Artificial Sequence
  Synthetic
cacuagaagauuuggauaa

SEQ ID NO: 12000 - RNA, 19 nt, Artificial Sequence
  Synthetic
gggaagugacauagacaau

SEQ ID NO: 12001 - RNA, 19 nt, Artificial Sequence
  Synthetic
gcgaagaguucaauuagua

SEQ ID NO: 12002 - RNA, 19 nt, Artificial Sequence
  Synthetic
gaagagaauuggcuguuaa

SEQ ID NO: 12003 - RNA, 19 nt, Artificial Sequence
  Synthetic
gggcugaauuugaagcaau

SEQ ID NO: 12004 - RNA, 19 nt, Artificial Sequence
  Synthetic
guaugaugauagucgaaua

SEQ ID NO: 12005 - RNA, 19 nt, Artificial Sequence
  Synthetic
gggcaaacugcuuggccaa

SEQ ID NO: 12006 - RNA, 19 nt, Artificial Sequence
  Synthetic
ugagaaacccugauguaaa

SEQ ID NO: 12007 - RNA, 19 nt, Artificial Sequence
  Synthetic
ggagaaggcuauggaagaa

SEQ ID NO: 12008 - RNA, 19 nt, Artificial Sequence
  Synthetic
guagaaaugcuaacugaaa

SEQ ID NO: 12009 - RNA, 19 nt, Artificial Sequence
  Synthetic
cagauaaucaucaggaauu

SEQ ID NO: 12010 - RNA, 19 nt, Artificial Sequence
  Synthetic
gaaugauguccgagucaaa

SEQ ID NO: 12011 - RNA, 19 nt, Artificial Sequence
  Synthetic
ggacaucacucuuaucaaa

SEQ ID NO: 12012 - RNA, 19 nt, Artificial Sequence
  Synthetic
ggauguugcuaaauagauu

SEQ ID NO: 12013 - RNA, 19 nt, Artificial Sequence
  Synthetic
aaacagguaucaugugaaa

SEQ ID NO: 12014 - RNA, 19 nt, Artificial Sequence
  Synthetic
cauaauggaugaucagcaa

SEQ ID NO: 12015 - RNA, 19 nt, Artificial Sequence
  Synthetic
agaauuggcuguuaagcaa

SEQ ID NO: 12016 - RNA, 19 nt, Artificial Sequence
  Synthetic
cgaauaagaagaaggggaa

SEQ ID NO: 12017 - RNA, 19 nt, Artificial Sequence
  Synthetic
ggccagggauguugcuaaa

SEQ ID NO: 12018 - RNA, 19 nt, Artificial Sequence
  Synthetic
auuugaacauagaggagaa

SEQ ID NO: 12019 - RNA, 19 nt, Artificial Sequence
  Synthetic
uggagaaggcuauggaaga

SEQ ID NO: 12020 - RNA, 19 nt, Artificial Sequence
  Synthetic
gggauagcuuucugcuuaa

SEQ ID NO: 12021 - RNA, 19 nt, Artificial Sequence
  Synthetic
ccaagaagguaucauguuu

SEQ ID NO: 12022 - RNA, 19 nt, Artificial Sequence
  Synthetic
gaugauagucgaauaagaa

SEQ ID NO: 12023 - RNA, 19 nt, Artificial Sequence
  Synthetic
ggagcgaagaguucaauua

SEQ ID NO: 12024 - RNA, 19 nt, Artificial Sequence
  Synthetic
gaaucaaguucgagcacaa

SEQ ID NO: 12025 - RNA, 19 nt, Artificial Sequence
  Synthetic
gcacaaauggcgagaacau

SEQ ID NO: 12026 - RNA, 19 nt, Artificial Sequence
  Synthetic
gauagaagcucaagcauga

SEQ ID NO: 12027 - RNA, 19 nt, Artificial Sequence
  Synthetic
ggagaugcugacagagaaa

SEQ ID NO: 12028 - RNA, 19 nt, Artificial Sequence
  Synthetic
gggcagaguaugaagcuau

SEQ ID NO: 12029 - RNA, 19 nt, Artificial Sequence
  Synthetic
gauaugagaccaugaagaa

SEQ ID NO: 12030 - RNA, 19 nt, Artificial Sequence
  Synthetic
caaagaugaaugaagcaaa

SEQ ID NO: 12031 - RNA, 19 nt, Artificial Sequence
  Synthetic
ggauaugagaccaugaaga

SEQ ID NO: 12032 - RNA, 19 nt, Artificial Sequence
  Synthetic
uggacaaccucuugaucua

SEQ ID NO: 12033 - RNA, 19 nt, Artificial Sequence
  Synthetic
augaaaagccuuaggauau

SEQ ID NO: 12034 - RNA, 19 nt, Artificial Sequence
  Synthetic
caugaaaagccuuaggaua

SEQ ID NO: 12035 - RNA, 19 nt, Artificial Sequence
  Synthetic
gaguugucauuaaaggaaa

SEQ ID NO: 12036 - RNA, 19 nt, Artificial Sequence
  Synthetic
gcuuagaguuggccauauu

SEQ ID NO: 12037 - RNA, 19 nt, Artificial Sequence
  Synthetic
cugacaacagacaggaaua

SEQ ID NO: 12038 - RNA, 19 nt, Artificial Sequence
  Synthetic
gaaaagagcugaagguugu

SEQ ID NO: 12039 - RNA, 19 nt, Artificial Sequence
  Synthetic
caggguaugaagaguguua

SEQ ID NO: 12040 - RNA, 19 nt, Artificial Sequence
  Synthetic
cgaaaguacacgcggcaga

SEQ ID NO: 12041 - RNA, 19 nt, Artificial Sequence
  Synthetic
ccgaauacggcgucaucaa

SEQ ID NO: 12042 - RNA, 19 nt, Artificial Sequence
  Synthetic
cggugaaagaccaguugaa

SEQ ID NO: 12043 - RNA, 19 nt, Artificial Sequence
  Synthetic
ggauauugcuguuguccca

SEQ ID NO: 12044 - RNA, 19 nt, Artificial Sequence
  Synthetic
ggacuacagugauggcaga

SEQ ID NO: 12045 - RNA, 19 nt, Artificial Sequence
  Synthetic
gcgagauccaguugcuaaa

SEQ ID NO: 12046 - RNA, 19 nt, Artificial Sequence
  Synthetic
gagcacaaauggcgagaac

SEQ ID NO: 12047 - RNA, 19 nt, Artificial Sequence
  Synthetic
aaacucagcuuuaugacaa

SEQ ID NO: 12048 - RNA, 19 nt, Artificial Sequence
  Synthetic
ggcagauccuggagggcau

SEQ ID NO: 12049 - RNA, 19 nt, Artificial Sequence
  Synthetic
guggagaugcugacagaga

SEQ ID NO: 12050 - RNA, 19 nt, Artificial Sequence
  Synthetic
gacaacaguauuuggacaa

SEQ ID NO: 12051 - RNA, 19 nt, Artificial Sequence
  Synthetic
ggccuaggcugcauugaaa

SEQ ID NO: 12052 - RNA, 19 nt, Artificial Sequence
  Synthetic
agggaaagcccauaugcua

SEQ ID NO: 12053 - RNA, 19 nt, Artificial Sequence
  Synthetic
gaacaaagacacaggucac

SEQ ID NO: 12054 - RNA, 19 nt, Artificial Sequence
  Synthetic
gaaaagagguaccgagaaa

SEQ ID NO: 12055 - RNA, 19 nt, Artificial Sequence
  Synthetic
cggucuaauuugaaagaaa

SEQ ID NO: 12056 - RNA, 19 nt, Artificial Sequence
  Synthetic
ggaugagagugaagaagaa

SEQ ID NO: 12057 - RNA, 19 nt, Artificial Sequence
  Synthetic
cgagaaaugaggagaaaga

SEQ ID NO: 12058 - RNA, 19 nt, Artificial Sequence
  Synthetic
gaaaugaggagaaagaaua

SEQ ID NO: 12059 - RNA, 19 nt, Artificial Sequence
  Synthetic
ggugcaaauuccuggguua

SEQ ID NO: 12060 - RNA, 19 nt, Artificial Sequence
  Synthetic
gauuaagcccugaaggaaa

SEQ ID NO: 12061 - RNA, 19 nt, Artificial Sequence
  Synthetic
uggagaauguggaagaaua

SEQ ID NO: 12062 - RNA, 19 nt, Artificial Sequence
  Synthetic
gaauuaaaggaguuggaaa

SEQ ID NO: 12063 - RNA, 19 nt, Artificial Sequence
  Synthetic
ugacacagaaggagaauua

SEQ ID NO: 12064 - RNA, 19 nt, Artificial Sequence
  Synthetic
gcaaagaggacaagaaaau

SEQ ID NO: 12065 - RNA, 19 nt, Artificial Sequence
  Synthetic
caacagagcgugaucauaa

SEQ ID NO: 12066 - RNA, 19 nt, Artificial Sequence
  Synthetic
caaccaaacaucagaggaa

SEQ ID NO: 12067 - RNA, 19 nt, Artificial Sequence
  Synthetic
gagcaaagaggacaagaaa

SEQ ID NO: 12068 - RNA, 19 nt, Artificial Sequence
  Synthetic
ggaaauagcagcagaauuc

SEQ ID NO: 12069 - RNA, 19 nt, Artificial Sequence
  Synthetic
gagcacaacuuucaaauua

SEQ ID NO: 12070 - RNA, 19 nt, Artificial Sequence
  Synthetic
ugagaaaggaccuggaaau

SEQ ID NO: 12071 - RNA, 19 nt, Artificial Sequence
  Synthetic
gagcuaugcaacaggauaa

SEQ ID NO: 12072 - RNA, 19 nt, Artificial Sequence
  Synthetic
gagaaaggaccuggaaaua

SEQ ID NO: 12073 - RNA, 19 nt, Artificial Sequence
  Synthetic
acauaaagacacuggaaaa

SEQ ID NO: 12074 - RNA, 19 nt, Artificial Sequence
  Synthetic
acagaagauaggagacaaa

SEQ ID NO: 12075 - RNA, 19 nt, Artificial Sequence
  Synthetic
cauaagacuaucaaggaaa

SEQ ID NO: 12076 - RNA, 19 nt, Artificial Sequence
  Synthetic
ccauaagacuaucaaggaa

SEQ ID NO: 12077 - RNA, 19 nt, Artificial Sequence
  Synthetic
gaagcaugcagguggauaa

SEQ ID NO: 12078 - RNA, 19 nt, Artificial Sequence
  Synthetic
agaaaugaggagaaagaau

SEQ ID NO: 12079 - RNA, 19 nt, Artificial Sequence
  Synthetic
gcugaggagaagaguauua

SEQ ID NO: 12080 - RNA, 19 nt, Artificial Sequence
  Synthetic
uaaagaagcugcauguuaa

SEQ ID NO: 12081 - RNA, 19 nt, Artificial Sequence
  Synthetic
caaggaaacugcagacgaa

SEQ ID NO: 12082 - RNA, 19 nt, Artificial Sequence
  Synthetic
ugaauuauguccugacuaa

SEQ ID NO: 12083 - RNA, 19 nt, Artificial Sequence
  Synthetic
guggaagaauacagcuaua

SEQ ID NO: 12084 - RNA, 19 nt, Artificial Sequence
  Synthetic
gcaaauacuggaaggauua

SEQ ID NO: 12085 - RNA, 19 nt, Artificial Sequence
  Synthetic
caauaaaguucuucggaau

SEQ ID NO: 12086 - RNA, 19 nt, Artificial Sequence
  Synthetic
caggaaagcucguaauuua

SEQ ID NO: 12087 - RNA, 19 nt, Artificial Sequence
  Synthetic
guauauggcaccagaaaua

SEQ ID NO: 12088 - RNA, 19 nt, Artificial Sequence
  Synthetic
ggacauaaagggugacaau

SEQ ID NO: 12089 - RNA, 19 nt, Artificial Sequence
  Synthetic
acaaugaaguugaggaaaa

SEQ ID NO: 12090 - RNA, 19 nt, Artificial Sequence
  Synthetic
gugacaauguguugauuaa

SEQ ID NO: 12091 - RNA, 19 nt, Artificial Sequence
  Synthetic
cagcagauauugucauaaa

SEQ ID NO: 12092 - RNA, 19 nt, Artificial Sequence
  Synthetic
cagaauugcuauuaaggaa

SEQ ID NO: 12093 - RNA, 19 nt, Artificial Sequence
  Synthetic
aaagagaugucaagggaau

SEQ ID NO: 12094 - RNA, 19 nt, Artificial Sequence
  Synthetic
aggaaaucccagagagaga

SEQ ID NO: 12095 - RNA, 19 nt, Artificial Sequence
  Synthetic
ucggaaagagaaagaauua

SEQ ID NO: 12096 - RNA, 19 nt, Artificial Sequence
  Synthetic
ggugcaaagcgaaggacaa

SEQ ID NO: 12097 - RNA, 19 nt, Artificial Sequence
  Synthetic
gguuagguuuccaguauua

SEQ ID NO: 12098 - RNA, 19 nt, Artificial Sequence
  Synthetic
ggaagaauugguucggaaa

SEQ ID NO: 12099 - RNA, 19 nt, Artificial Sequence
  Synthetic
ggacaaguugcuucagaua

SEQ ID NO: 12100 - RNA, 19 nt, Artificial Sequence
  Synthetic
gcugaagaaccgaaacuaa

SEQ ID NO: 12101 - RNA, 19 nt, Artificial Sequence
  Synthetic
ggaaagagaaagaauuaca

SEQ ID NO: 12102 - RNA, 19 nt, Artificial Sequence
  Synthetic
ggaaggagacugugaaagu

SEQ ID NO: 12103 - RNA, 19 nt, Artificial Sequence
  Synthetic
ucaucgagcuauugaagaa

SEQ ID NO: 12104 - RNA, 19 nt, Artificial Sequence
  Synthetic
acagagauauccaggacua

SEQ ID NO: 12105 - RNA, 19 nt, Artificial Sequence
  Synthetic
agcaaauacuggaaggauu

SEQ ID NO: 12106 - RNA, 19 nt, Artificial Sequence
  Synthetic
cugcagaggccaaggcauu

SEQ ID NO: 12107 - RNA, 19 nt, Artificial Sequence
  Synthetic
ccaauagauuacuggaaga

SEQ ID NO: 12108 - RNA, 19 nt, Artificial Sequence
  Synthetic
cugaagaaccgaaacuaaa

SEQ ID NO: 12109 - RNA, 19 nt, Artificial Sequence
  Synthetic
ugaaauggccacaggaaaa

SEQ ID NO: 12110 - RNA, 19 nt, Artificial Sequence
  Synthetic
ggagaaaggcgcugcacuu

SEQ ID NO: 12111 - RNA, 19 nt, Artificial Sequence
  Synthetic
gcaccagaaauaauagaua

SEQ ID NO: 12112 - RNA, 19 nt, Artificial Sequence
  Synthetic
gugagaaaccuaauggaau

SEQ ID NO: 12113 - RNA, 19 nt, Artificial Sequence
  Synthetic
uggaagaauugguucggaa

SEQ ID NO: 12114 - RNA, 19 nt, Artificial Sequence
  Synthetic
gcagaaaccauguggaaga

SEQ ID NO: 12115 - RNA, 19 nt, Artificial Sequence
  Synthetic
uggagaagaugcaguauua

SEQ ID NO: 12116 - RNA, 19 nt, Artificial Sequence
  Synthetic
ggaugaauggagaggacaa

SEQ ID NO: 12117 - RNA, 19 nt, Artificial Sequence
  Synthetic
gggacaaugugcugaucaa

SEQ ID NO: 12118 - RNA, 19 nt, Artificial Sequence
  Synthetic
gggcagaaaccauguggaa

SEQ ID NO: 12119 - RNA, 19 nt, Artificial Sequence
  Synthetic
acaagaacauagugcgcua

SEQ ID NO: 12120 - RNA, 19 nt, Artificial Sequence
  Synthetic
cgugagagcuucagcauga

SEQ ID NO: 12121 - RNA, 19 nt, Artificial Sequence
  Synthetic
ucgcaaggcuuuugacgua

SEQ ID NO: 12122 - RNA, 19 nt, Artificial Sequence
  Synthetic
gauuaugaguacacggaga

SEQ ID NO: 12123 - RNA, 19 nt, Artificial Sequence
  Synthetic
gcaaaggcugcguggagaa

SEQ ID NO: 12124 - RNA, 19 nt, Artificial Sequence
  Synthetic
gggagauguuggaguuuga

SEQ ID NO: 12125 - RNA, 19 nt, Artificial Sequence
  Synthetic
agacaaagcguauuaaaca

SEQ ID NO: 12126 - RNA, 19 nt, Artificial Sequence
  Synthetic
ccaaagagcuccggcuaau

SEQ ID NO: 12127 - RNA, 19 nt, Artificial Sequence
  Synthetic
ccgcaguauuggagcagga

SEQ ID NO: 12128 - RNA, 19 nt, Artificial Sequence
  Synthetic
ggacaaaggcagcuucuga

SEQ ID NO: 12129 - RNA, 19 nt, Artificial Sequence
  Synthetic
ggaaggaacgggaguacca

SEQ ID NO: 12130 - RNA, 19 nt, Artificial Sequence
  Synthetic
gaccggagguggagaagga

SEQ ID NO: 12131 - RNA, 19 nt, Artificial Sequence
  Synthetic
gggaggauguuuuccagaa

SEQ ID NO: 12132 - RNA, 19 nt, Artificial Sequence
  Synthetic
ccaagcacuaccagacaaa

SEQ ID NO: 12133 - RNA, 19 nt, Artificial Sequence
  Synthetic
acugagaccuucacaggaa

SEQ ID NO: 12134 - RNA, 19 nt, Artificial Sequence
  Synthetic
ccauguuucagguggguau

SEQ ID NO: 12135 - RNA, 19 nt, Artificial Sequence
  Synthetic
cugcaaagcucgagguucg

SEQ ID NO: 12136 - RNA, 19 nt, Artificial Sequence
  Synthetic
gcguggagaagaugcagua

SEQ ID NO: 12137 - RNA, 19 nt, Artificial Sequence
  Synthetic
gaugaauggagaggacaaa

SEQ ID NO: 12138 - RNA, 19 nt, Artificial Sequence
  Synthetic
agauguuggaguuugauua

SEQ ID NO: 12139 - RNA, 19 nt, Artificial Sequence
  Synthetic
gcucaagauuucugacuuc

SEQ ID NO: 12140 - RNA, 19 nt, Artificial Sequence
  Synthetic
gcggcuaccuuaagaucuu

SEQ ID NO: 12141 - RNA, 19 nt, Artificial Sequence
  Synthetic
uccaaaugcuguugaacca

SEQ ID NO: 12142 - RNA, 19 nt, Artificial Sequence
  Synthetic
ggccguaucuacaaggaca

SEQ ID NO: 12143 - RNA, 19 nt, Artificial Sequence
  Synthetic
ucacaggaacucugcagua

SEQ ID NO: 12144 - RNA, 19 nt, Artificial Sequence
  Synthetic
gguaguaauuacagugaaa

SEQ ID NO: 12145 - RNA, 19 nt, Artificial Sequence
  Synthetic
ggaagagguuguuggaaga

SEQ ID NO: 12146 - RNA, 19 nt, Artificial Sequence
  Synthetic
aggcaaagcaacagaguga

SEQ ID NO: 12147 - RNA, 19 nt, Artificial Sequence
  Synthetic
aaagcuaaguggagagcaa

SEQ ID NO: 12148 - RNA, 19 nt, Artificial Sequence
  Synthetic
ggacauugcuucuacaaau

SEQ ID NO: 12149 - RNA, 19 nt, Artificial Sequence
  Synthetic
agaacaugauugagcuuaa

SEQ ID NO: 12150 - RNA, 19 nt, Artificial Sequence
  Synthetic
gagugaaucuggacguuua

SEQ ID NO: 12151 - RNA, 19 nt, Artificial Sequence
  Synthetic
ccugaugauuccacagaua

SEQ ID NO: 12152 - RNA, 19 nt, Artificial Sequence
  Synthetic
ggguauuauucuuugggaa

SEQ ID NO: 12153 - RNA, 19 nt, Artificial Sequence
  Synthetic
gguggaaccucaagaauga

SEQ ID NO: 12154 - RNA, 19 nt, Artificial Sequence
  Synthetic
cagaugaaggacagagcaa

SEQ ID NO: 12155 - RNA, 19 nt, Artificial Sequence
  Synthetic
gcaaagcaacagagugaau

SEQ ID NO: 12156 - RNA, 19 nt, Artificial Sequence
  Synthetic
agugauaacgcgucggaaa

SEQ ID NO: 12157 - RNA, 19 nt, Artificial Sequence
  Synthetic
augaaaaggaccagcaaaa

SEQ ID NO: 12158 - RNA, 19 nt, Artificial Sequence
  Synthetic
uagagugauuggugguaua

SEQ ID NO: 12159 - RNA, 19 nt, Artificial Sequence
  Synthetic
acagagaaagcaagaacua

SEQ ID NO: 12160 - RNA, 19 nt, Artificial Sequence
  Synthetic
ggagcaguguggagagcuu

SEQ ID NO: 12161 - RNA, 19 nt, Artificial Sequence
  Synthetic
gugcugaaccauugccaua

SEQ ID NO: 12162 - RNA, 19 nt, Artificial Sequence
  Synthetic
uugaagagaucgacuacaa

SEQ ID NO: 12163 - RNA, 19 nt, Artificial Sequence
  Synthetic
aaagugaaucugagaggaa

SEQ ID NO: 12164 - RNA, 19 nt, Artificial Sequence
  Synthetic
agugauuggugguauauua

SEQ ID NO: 12165 - RNA, 19 nt, Artificial Sequence
  Synthetic
ccugaaaccaccaaacuua

SEQ ID NO: 12166 - RNA, 19 nt, Artificial Sequence
  Synthetic
gaaaaggaccagcaaaaua

SEQ ID NO: 12167 - RNA, 19 nt, Artificial Sequence
  Synthetic
ugacgauucaugaguguua

SEQ ID NO: 12168 - RNA, 19 nt, Artificial Sequence
  Synthetic
gcacaagaauauaugaaag

SEQ ID NO: 12169 - RNA, 19 nt, Artificial Sequence
  Synthetic
uacggaaccuuuagggaua

SEQ ID NO: 12170 - RNA, 19 nt, Artificial Sequence
  Synthetic
uggaggaaauugugaaaau

SEQ ID NO: 12171 - RNA, 19 nt, Artificial Sequence
  Synthetic
acaaggagaucgaggugga

SEQ ID NO: 12172 - RNA, 19 nt, Artificial Sequence
  Synthetic
cagaacaggagguaucaaa

SEQ ID NO: 12173 - RNA, 19 nt, Artificial Sequence
  Synthetic
cggaaauacggaaccuuua

SEQ ID NO: 12174 - RNA, 19 nt, Artificial Sequence
  Synthetic
ggucaaaucaacugaauaa

SEQ ID NO: 12175 - RNA, 19 nt, Artificial Sequence
  Synthetic
ccagaaagagcaacaguaa

SEQ ID NO: 12176 - RNA, 19 nt, Artificial Sequence
  Synthetic
gagcaacaguaauggagua

SEQ ID NO: 12177 - RNA, 19 nt, Artificial Sequence
  Synthetic
gcuuaguggccaagaggua

SEQ ID NO: 12178 - RNA, 19 nt, Artificial Sequence
  Synthetic
aagcugacuuacaggaaua

SEQ ID NO: 12179 - RNA, 19 nt, Artificial Sequence
  Synthetic
gaaugugaccuuuaagaaa

SEQ ID NO: 12180 - RNA, 19 nt, Artificial Sequence
  Synthetic
gugaagagccagcaguuua

SEQ ID NO: 12181 - RNA, 19 nt, Artificial Sequence
  Synthetic
caacaguaauggaguacau

SEQ ID NO: 12182 - RNA, 19 nt, Artificial Sequence
  Synthetic
ccaaauagauuccgauguu

SEQ ID NO: 12183 - RNA, 19 nt, Artificial Sequence
  Synthetic
gauauuaaaccuagcaaca

SEQ ID NO: 12184 - RNA, 19 nt, Artificial Sequence
  Synthetic
guacauaauccacaagcaa

SEQ ID NO: 12185 - RNA, 19 nt, Artificial Sequence
  Synthetic
aagcuucccuggagagaaa

SEQ ID NO: 12186 - RNA, 19 nt, Artificial Sequence
  Synthetic
agaaaagaauggcguguaa

SEQ ID NO: 12187 - RNA, 19 nt, Artificial Sequence
  Synthetic
caaccaaagcagacaucua

SEQ ID NO: 12188 - RNA, 19 nt, Artificial Sequence
  Synthetic
gugaguagucuuauguaaa

SEQ ID NO: 12189 - RNA, 19 nt, Artificial Sequence
  Synthetic
ucacaaggauaauagagua

SEQ ID NO: 12190 - RNA, 19 nt, Artificial Sequence
  Synthetic
auggcuaacugaugaauua

SEQ ID NO: 12191 - RNA, 19 nt, Artificial Sequence
  Synthetic
ugacaaagcauguucucaa

SEQ ID NO: 12192 - RNA, 19 nt, Artificial Sequence
  Synthetic
cccaagagccgcagaccua

SEQ ID NO: 12193 - RNA, 19 nt, Artificial Sequence
  Synthetic
ggacguuaccaaauagauu

SEQ ID NO: 12194 - RNA, 19 nt, Artificial Sequence
  Synthetic
gguaaauucugguauacau

SEQ ID NO: 12195 - RNA, 19 nt, Artificial Sequence
  Synthetic
cacaagauauaaagacgaa

SEQ ID NO: 12196 - RNA, 19 nt, Artificial Sequence
  Synthetic
ccacaggaaucuggaauuu

SEQ ID NO: 12197 - RNA, 19 nt, Artificial Sequence
  Synthetic
cagaauagcuguuuugugu

SEQ ID NO: 12198 - RNA, 19 nt, Artificial Sequence
  Synthetic
caagauauaaagacgaaga

SEQ ID NO: 12199 - RNA, 19 nt, Artificial Sequence
  Synthetic
gcaagaggcugcugaguag

SEQ ID NO: 12200 - RNA, 19 nt, Artificial Sequence
  Synthetic
acucaaagaaagugaucca

SEQ ID NO: 12201 - RNA, 19 nt, Artificial Sequence
  Synthetic
ggaugagagagcugauaga

SEQ ID NO: 12202 - RNA, 19 nt, Artificial Sequence
  Synthetic
uggagaaacuggagagcug

SEQ ID NO: 12203 - RNA, 19 nt, Artificial Sequence
  Synthetic
guacaugagcacuggaagu

SEQ ID NO: 12204 - RNA, 19 nt, Artificial Sequence
  Synthetic
ugagaaagcuaaugguuua

SEQ ID NO: 12205 - RNA, 19 nt, Artificial Sequence
  Synthetic
ggaugagguugcugugaaa

SEQ ID NO: 12206 - RNA, 19 nt, Artificial Sequence
  Synthetic
gcaacaagauucugaagau

SEQ ID NO: 12207 - RNA, 19 nt, Artificial Sequence
  Synthetic
ugaagaaacgcaagggcaa

SEQ ID NO: 12208 - RNA, 19 nt, Artificial Sequence
  Synthetic
gugaagggcccaaggagua

SEQ ID NO: 12209 - RNA, 19 nt, Artificial Sequence
  Synthetic
cgaugaaauugucguguau

SEQ ID NO: 12210 - RNA, 19 nt, Artificial Sequence
  Synthetic
cagccagaccauagagaau

SEQ ID NO: 12211 - RNA, 19 nt, Artificial Sequence
  Synthetic
ggauauaagcaguggucgu

SEQ ID NO: 12212 - RNA, 19 nt, Artificial Sequence
  Synthetic
cgaccaucuuucacgaaua

SEQ ID NO: 12213 - RNA, 19 nt, Artificial Sequence
  Synthetic
gcacagagacgcccagcaa

SEQ ID NO: 12214 - RNA, 19 nt, Artificial Sequence
  Synthetic
gcgaugaaauugucgugua

SEQ ID NO: 12215 - RNA, 19 nt, Artificial Sequence
  Synthetic
gugagaaagcuaaugguuu

SEQ ID NO: 12216 - RNA, 19 nt, Artificial Sequence
  Synthetic
gggaugagguugcugugaa

SEQ ID NO: 12217 - RNA, 19 nt, Artificial Sequence
  Synthetic
ggaguuugcucguggagga

SEQ ID NO: 12218 - RNA, 19 nt, Artificial Sequence
  Synthetic
uugccaaacucauggaaga

SEQ ID NO: 12219 - RNA, 19 nt, Artificial Sequence
  Synthetic
uggaagagauuauuggcau

SEQ ID NO: 12220 - RNA, 19 nt, Artificial Sequence
  Synthetic
agaauggagaccugagcaa

SEQ ID NO: 12221 - RNA, 19 nt, Artificial Sequence
  Synthetic
gcagauugccagagggaug

SEQ ID NO: 12222 - RNA, 19 nt, Artificial Sequence
  Synthetic
agaagaaccaggaggaacu

SEQ ID NO: 12223 - RNA, 19 nt, Artificial Sequence
  Synthetic
cagugaaggcccagggagu

SEQ ID NO: 12224 - RNA, 19 nt, Artificial Sequence
  Synthetic
ccauagaggagucugguuu

SEQ ID NO: 12225 - RNA, 19 nt, Artificial Sequence
  Synthetic
caacucagggccaaagaaa

SEQ ID NO: 12226 - RNA, 19 nt, Artificial Sequence
  Synthetic
cagcaggaguucuggucuu

SEQ ID NO: 12227 - RNA, 19 nt, Artificial Sequence
  Synthetic
gaccuuaaguccagcaaca

SEQ ID NO: 12228 - RNA, 19 nt, Artificial Sequence
  Synthetic
augaaauugucguguauga

SEQ ID NO: 12229 - RNA, 19 nt, Artificial Sequence
  Synthetic
caaacgagauccuaaccaa

SEQ ID NO: 12230 - RNA, 19 nt, Artificial Sequence
  Synthetic
gagcggaacugaacacaca

SEQ ID NO: 12231 - RNA, 19 nt, Artificial Sequence
  Synthetic
ccauucaguuguuagaaau

SEQ ID NO: 12232 - RNA, 19 nt, Artificial Sequence
  Synthetic
agccacaggccuaggguuu

SEQ ID NO: 12233 - RNA, 19 nt, Artificial Sequence
  Synthetic
cccauucaguuguuagaaa

SEQ ID NO: 12234 - RNA, 19 nt, Artificial Sequence
  Synthetic
aggaaaagaugaagagaaa

SEQ ID NO: 12235 - RNA, 19 nt, Artificial Sequence
  Synthetic
gggaagugcuccagggacu

SEQ ID NO: 12236 - RNA, 19 nt, Artificial Sequence
  Synthetic
acugaagaaucccgggaaa

SEQ ID NO: 12237 - RNA, 19 nt, Artificial Sequence
  Synthetic
ugacccagguagaggaaga

SEQ ID NO: 12238 - RNA, 19 nt, Artificial Sequence
  Synthetic
gcaaggaagaacaugguuu

SEQ ID NO: 12239 - RNA, 19 nt, Artificial Sequence
  Synthetic
gguaccagcccaugaacaa

SEQ ID NO: 12240 - RNA, 19 nt, Artificial Sequence
  Synthetic
ggaaauccucauauugaaa

SEQ ID NO: 12241 - RNA, 19 nt, Artificial Sequence
  Synthetic
aagaagauacacagggaca

SEQ ID NO: 12242 - RNA, 19 nt, Artificial Sequence
  Synthetic
ccaccaagaugcucaguca

SEQ ID NO: 12243 - RNA, 19 nt, Artificial Sequence
  Synthetic
ccaagaaggaaaagaugaa

SEQ ID NO: 12244 - RNA, 19 nt, Artificial Sequence
  Synthetic
gagcuaacauccucaucaa

SEQ ID NO: 12245 - RNA, 19 nt, Artificial Sequence
  Synthetic
cuuuaaggcucgagacaag

SEQ ID NO: 12246 - RNA, 19 nt, Artificial Sequence
  Synthetic
ucacagaagaagauacaca

SEQ ID NO: 12247 - RNA, 19 nt, Artificial Sequence
  Synthetic
agaagaagauacacaggga

SEQ ID NO: 12248 - RNA, 19 nt, Artificial Sequence
  Synthetic
ccuggaucuucuugacaaa

SEQ ID NO: 12249 - RNA, 19 nt, Artificial Sequence
  Synthetic
gaaagagaccagagcagga

SEQ ID NO: 12250 - RNA, 19 nt, Artificial Sequence
  Synthetic
uggugaagauggagccuga

SEQ ID NO: 12251 - RNA, 19 nt, Artificial Sequence
  Synthetic
agauggagccugaugauga

SEQ ID NO: 12252 - RNA, 19 nt, Artificial Sequence
  Synthetic
cacugaagauggugaagau

SEQ ID NO: 12253 - RNA, 19 nt, Artificial Sequence
  Synthetic
ggaugaggagcccgagcua

SEQ ID NO: 12254 - RNA, 19 nt, Artificial Sequence
  Synthetic
ugaagauggugaagaugga

SEQ ID NO: 12255 - RNA, 19 nt, Artificial Sequence
  Synthetic
ugucagagcuccagauuag

SEQ ID NO: 12256 - RNA, 19 nt, Artificial Sequence
  Synthetic
aaggaaaagaugaagagaa

SEQ ID NO: 12257 - RNA, 19 nt, Artificial Sequence
  Synthetic
ccugaagggaggauacaau

SEQ ID NO: 12258 - RNA, 19 nt, Artificial Sequence
  Synthetic
ccaccaagauccaggacac

SEQ ID NO: 12259 - RNA, 19 nt, Artificial Sequence
  Synthetic
ggacaucuaccaagugaca

SEQ ID NO: 12260 - RNA, 19 nt, Artificial Sequence
  Synthetic
ggguguacuccaucaacaa

SEQ ID NO: 12261 - RNA, 19 nt, Artificial Sequence
  Synthetic
cggaaagagaccagagcag

SEQ ID NO: 12262 - RNA, 19 nt, Artificial Sequence
  Synthetic
ccaagauccaggacaccaa

SEQ ID NO: 12263 - RNA, 19 nt, Artificial Sequence
  Synthetic
acuaugacgacguggacau

SEQ ID NO: 12264 - RNA, 19 nt, Artificial Sequence
  Synthetic
cagaaguaauccugagaaa

SEQ ID NO: 12265 - RNA, 19 nt, Artificial Sequence
  Synthetic
gggaagauccacagagaca

SEQ ID NO: 12266 - RNA, 19 nt, Artificial Sequence
  Synthetic
cugcauuuguccugggaaa

SEQ ID NO: 12267 - RNA, 19 nt, Artificial Sequence
  Synthetic
gcgcaaagguggcuacaau

SEQ ID NO: 12268 - RNA, 19 nt, Artificial Sequence
  Synthetic
ccgcccaaacugagagaua

SEQ ID NO: 12269 - RNA, 19 nt, Artificial Sequence
  Synthetic
ggacaaagccagugacccu

SEQ ID NO: 12270 - RNA, 19 nt, Artificial Sequence
  Synthetic
gguauuuaagagagaacua

SEQ ID NO: 12271 - RNA, 19 nt, Artificial Sequence
  Synthetic
gguaugagccgcugcagaa

SEQ ID NO: 12272 - RNA, 19 nt, Artificial Sequence
  Synthetic
agagagaacuauauuggua

SEQ ID NO: 12273 - RNA, 19 nt, Artificial Sequence
  Synthetic
acugugagcuggagaccua

SEQ ID NO: 12274 - RNA, 19 nt, Artificial Sequence
  Synthetic
acacaauccuagucagcuu

SEQ ID NO: 12275 - RNA, 19 nt, Artificial Sequence
  Synthetic
ggagaucacagaugaaaca

SEQ ID NO: 12276 - RNA, 19 nt, Artificial Sequence
  Synthetic
ugaagauagucaagcuaga

SEQ ID NO: 12277 - RNA, 19 nt, Artificial Sequence
  Synthetic
acaucauccuggagagcau

SEQ ID NO: 12278 - RNA, 19 nt, Artificial Sequence
  Synthetic
cagagaagcuccugcagca

SEQ ID NO: 12279 - RNA, 19 nt, Artificial Sequence
  Synthetic
ccucagaauuccaggagcu

SEQ ID NO: 12280 - RNA, 19 nt, Artificial Sequence
  Synthetic
aaggaagaguugaguggga

SEQ ID NO: 12281 - RNA, 19 nt, Artificial Sequence
  Synthetic
ggaccuauggcgacgucua

SEQ ID NO: 12282 - RNA, 19 nt, Artificial Sequence
  Synthetic
gcugucacucucagggaaa

SEQ ID NO: 12283 - RNA, 19 nt, Artificial Sequence
  Synthetic
gaaguaauccugagaaaug

SEQ ID NO: 12284 - RNA, 19 nt, Artificial Sequence
  Synthetic
gcaaagguggcuacaauga

SEQ ID NO: 12285 - RNA, 19 nt, Artificial Sequence
  Synthetic
ggacagggacacaauccua

SEQ ID NO: 12286 - RNA, 19 nt, Artificial Sequence
  Synthetic
ccaagauuccugacaccaa

SEQ ID NO: 12287 - RNA, 19 nt, Artificial Sequence
  Synthetic
ccucggagauccaguuuca

SEQ ID NO: 12288 - RNA, 19 nt, Artificial Sequence
  Synthetic
gagagaacuauauugguau

SEQ ID NO: 12289 - RNA, 19 nt, Artificial Sequence
  Synthetic
ggaaugaccgcuuguggau

SEQ ID NO: 12290 - RNA, 19 nt, Artificial Sequence
  Synthetic
ccaggagaucacagaugaa

SEQ ID NO: 12291 - RNA, 19 nt, Artificial Sequence
  Synthetic
acccagaggcgcacagcaa

SEQ ID NO: 12292 - RNA, 19 nt, Artificial Sequence
  Synthetic
accaagaauccuaagaaga

SEQ ID NO: 12293 - RNA, 19 nt, Artificial Sequence
  Synthetic
ccacagagacaucaaggga

SEQ ID NO: 12294 - RNA, 19 nt, Artificial Sequence
  Synthetic
ggauaauggucaugugaaa

SEQ ID NO: 12295 - RNA, 19 nt, Artificial Sequence
  Synthetic
caaucgagcuguuggauaa

SEQ ID NO: 12296 - RNA, 19 nt, Artificial Sequence
  Synthetic
ggacaguucagaagaaaua

SEQ ID NO: 12297 - RNA, 19 nt, Artificial Sequence
  Synthetic
cgagauaagcuuuggauuu

SEQ ID NO: 12298 - RNA, 19 nt, Artificial Sequence
  Synthetic
gagaaacacugcagggauu

SEQ ID NO: 12299 - RNA, 19 nt, Artificial Sequence
  Synthetic
acacaaaccuguugccuua

SEQ ID NO: 12300 - RNA, 19 nt, Artificial Sequence
  Synthetic
ucauauugcugaagacaua

SEQ ID NO: 12301 - RNA, 19 nt, Artificial Sequence
  Synthetic
uguuaacacuggugaauua

SEQ ID NO: 12302 - RNA, 19 nt, Artificial Sequence
  Synthetic
gcauauguuagcagagaaa

SEQ ID NO: 12303 - RNA, 19 nt, Artificial Sequence
  Synthetic
gaaaguaggccaacugaua

SEQ ID NO: 12304 - RNA, 19 nt, Artificial Sequence
  Synthetic
gcacagagauauaaaggga

SEQ ID NO: 12305 - RNA, 19 nt, Artificial Sequence
  Synthetic
cagaauacugccaaggaaa

SEQ ID NO: 12306 - RNA, 19 nt, Artificial Sequence
  Synthetic
gaaugaacauagaggcaca

SEQ ID NO: 12307 - RNA, 19 nt, Artificial Sequence
  Synthetic
acaguuaacucuagaaaga

SEQ ID NO: 12308 - RNA, 19 nt, Artificial Sequence
  Synthetic
gaaccaaugcagaaauuua

SEQ ID NO: 12309 - RNA, 19 nt, Artificial Sequence
  Synthetic
ucagauagcacaagaauuu

SEQ ID NO: 12310 - RNA, 19 nt, Artificial Sequence
  Synthetic
agagauaaccuuuggccaa

SEQ ID NO: 12311 - RNA, 19 nt, Artificial Sequence
  Synthetic
ggaugaaaaucaaggaaca

SEQ ID NO: 12312 - RNA, 19 nt, Artificial Sequence
  Synthetic
ccacuuagaauguuugaaa

SEQ ID NO: 12313 - RNA, 19 nt, Artificial Sequence
  Synthetic
ccuacaagacagugugcua

SEQ ID NO: 12314 - RNA, 19 nt, Artificial Sequence
  Synthetic
ccaguuaaauggugaacga

SEQ ID NO: 12315 - RNA, 19 nt, Artificial Sequence
  Synthetic
ugaaggagaugaugaugaa

SEQ ID NO: 12316 - RNA, 19 nt, Artificial Sequence
  Synthetic
gaaauauacuacacugcaa

SEQ ID NO: 12317 - RNA, 19 nt, Artificial Sequence
  Synthetic
cuggaaacauggaaugcaa

SEQ ID NO: 12318 - RNA, 19 nt, Artificial Sequence
  Synthetic
cauagaacuugcagagcuu

SEQ ID NO: 12319 - RNA, 19 nt, Artificial Sequence
  Synthetic
caguagagguagagacuuc

SEQ ID NO: 12320 - RNA, 19 nt, Artificial Sequence
  Synthetic
ccaccaaagccuaagucua

SEQ ID NO: 12321 - RNA, 19 nt, Artificial Sequence
  Synthetic
gcauaugggugcauguuuu

SEQ ID NO: 12322 - RNA, 19 nt, Artificial Sequence
  Synthetic
gauauuuggugccgaagaa

SEQ ID NO: 12323 - RNA, 19 nt, Artificial Sequence
  Synthetic
guuaaauggugaacgagau

SEQ ID NO: 12324 - RNA, 19 nt, Artificial Sequence
  Synthetic
gaagaagagaggcgagaaa

SEQ ID NO: 12325 - RNA, 19 nt, Artificial Sequence
  Synthetic
uuacagaccuugugaagaa

SEQ ID NO: 12326 - RNA, 19 nt, Artificial Sequence
  Synthetic
ggagagaacaagaagaaaa

SEQ ID NO: 12327 - RNA, 19 nt, Artificial Sequence
  Synthetic
ggccagagguugaaaguga

SEQ ID NO: 12328 - RNA, 19 nt, Artificial Sequence
  Synthetic
gagcaauggugaaacggaa

SEQ ID NO: 12329 - RNA, 19 nt, Artificial Sequence
  Synthetic
ggugaaacuuguugacuuu

SEQ ID NO: 12330 - RNA, 19 nt, Artificial Sequence
  Synthetic
ggauugagcagcagaaaga

SEQ ID NO: 12331 - RNA, 19 nt, Artificial Sequence
  Synthetic
ugguggaagugguuggaaa

SEQ ID NO: 12332 - RNA, 19 nt, Artificial Sequence
  Synthetic
gaggagaguugaaagagaa

SEQ ID NO: 12333 - RNA, 19 nt, Artificial Sequence
  Synthetic
gagaaggcgcaaagaagaa

SEQ ID NO: 12334 - RNA, 19 nt, Artificial Sequence
  Synthetic
aggaagaagaggaggaagu

SEQ ID NO: 12335 - RNA, 19 nt, Artificial Sequence
  Synthetic
auccagaaguugagaagaa

SEQ ID NO: 12336 - RNA, 19 nt, Artificial Sequence
  Synthetic
ggaaaggcucaguggucaa

SEQ ID NO: 12337 - RNA, 19 nt, Artificial Sequence
  Synthetic
ccaaaugaaaggcaaguua

SEQ ID NO: 12338 - RNA, 19 nt, Artificial Sequence
  Synthetic
guacagugggagugaggaa

SEQ ID NO: 12339 - RNA, 19 nt, Artificial Sequence
  Synthetic
gcaacaagaacaagcauau

SEQ ID NO: 12340 - RNA, 19 nt, Artificial Sequence
  Synthetic
guaaauacaagaagagguu

SEQ ID NO: 12341 - RNA, 19 nt, Artificial Sequence
  Synthetic
aaagagaacaggaguauau

SEQ ID NO: 12342 - RNA, 19 nt, Artificial Sequence
  Synthetic
ucacaaugauccagaaguu

SEQ ID NO: 12343 - RNA, 19 nt, Artificial Sequence
  Synthetic
gaggaaggccagagguuga

SEQ ID NO: 12344 - RNA, 19 nt, Artificial Sequence
  Synthetic
acagaaacauugcaacaua

SEQ ID NO: 12345 - RNA, 19 nt, Artificial Sequence
  Synthetic
gaaagaugaaacugaguau

SEQ ID NO: 12346 - RNA, 19 nt, Artificial Sequence
  Synthetic
ugacaucuguggugggauu

SEQ ID NO: 12347 - RNA, 19 nt, Artificial Sequence
  Synthetic
agaagagaggcgagaaaga

SEQ ID NO: 12348 - RNA, 19 nt, Artificial Sequence
  Synthetic
augaagaggaagaaaucaa

SEQ ID NO: 12349 - RNA, 19 nt, Artificial Sequence
  Synthetic
aggaugaagaggaagaaau

SEQ ID NO: 12350 - RNA, 19 nt, Artificial Sequence
  Synthetic
ccucaagccugcuggcgaa

SEQ ID NO: 12351 - RNA, 19 nt, Artificial Sequence
  Synthetic
gcaaagaagaagaggagag

SEQ ID NO: 12352 - RNA, 19 nt, Artificial Sequence
  Synthetic
ccgaagacgauuucaacaa

SEQ ID NO: 12353 - RNA, 19 nt, Artificial Sequence
  Synthetic
gcgagaaagaugaaacuga

SEQ ID NO: 12354 - RNA, 19 nt, Artificial Sequence
  Synthetic
gaaaguaggccaacagaaa

SEQ ID NO: 12355 - RNA, 19 nt, Artificial Sequence
  Synthetic
cgucauaccauuagaucua

SEQ ID NO: 12356 - RNA, 19 nt, Artificial Sequence
  Synthetic
acggacagcuucagaaaua

SEQ ID NO: 12357 - RNA, 19 nt, Artificial Sequence
  Synthetic
uaacacaguuggagagaga

SEQ ID NO: 12358 - RNA, 19 nt, Artificial Sequence
  Synthetic
ggcaaaaugcauagagaua

SEQ ID NO: 12359 - RNA, 19 nt, Artificial Sequence
  Synthetic
acacaguuggagagagaua

SEQ ID NO: 12360 - RNA, 19 nt, Artificial Sequence
  Synthetic
ugucauuaucagaaggaaa

SEQ ID NO: 12361 - RNA, 19 nt, Artificial Sequence
  Synthetic
uggaaauggugaugguauu

SEQ ID NO: 12362 - RNA, 19 nt, Artificial Sequence
  Synthetic
ggagagagauaccguuuua

SEQ ID NO: 12363 - RNA, 19 nt, Artificial Sequence
  Synthetic
gccuauguaugcagagaaa

SEQ ID NO: 12364 - RNA, 19 nt, Artificial Sequence
  Synthetic
gcaaaugaucuguacuuua

SEQ ID NO: 12365 - RNA, 19 nt, Artificial Sequence
  Synthetic
gguaugagccaaugcagaa

SEQ ID NO: 12366 - RNA, 19 nt, Artificial Sequence
  Synthetic
ccauguuacuggaccauua

SEQ ID NO: 12367 - RNA, 19 nt, Artificial Sequence
  Synthetic
caaaauagcacuaaccaaa

SEQ ID NO: 12368 - RNA, 19 nt, Artificial Sequence
  Synthetic
cuauaaggccagaaaugua

SEQ ID NO: 12369 - RNA, 19 nt, Artificial Sequence
  Synthetic
caacagaaacugaucucaa

SEQ ID NO: 12370 - RNA, 19 nt, Artificial Sequence
  Synthetic
cugaaagacuucugacuca

SEQ ID NO: 12371 - RNA, 19 nt, Artificial Sequence
  Synthetic
gcaguuacccugaagacaa

SEQ ID NO: 12372 - RNA, 19 nt, Artificial Sequence
  Synthetic
ggacagcuucagaaauaaa

SEQ ID NO: 12373 - RNA, 19 nt, Artificial Sequence
  Synthetic
gcaaauacuggcaaaucaa

SEQ ID NO: 12374 - RNA, 19 nt, Artificial Sequence
  Synthetic
ggacaaaacaaaaugguca

SEQ ID NO: 12375 - RNA, 19 nt, Artificial Sequence
  Synthetic
ucuucaugguuuacagaaa

SEQ ID NO: 12376 - RNA, 19 nt, Artificial Sequence
  Synthetic
cuccaaaacuaaaggacaa

SEQ ID NO: 12377 - RNA, 19 nt, Artificial Sequence
  Synthetic
gaacggacagcuucagaaa

SEQ ID NO: 12378 - RNA, 19 nt, Artificial Sequence
  Synthetic
caaagauuccugauacaaa

SEQ ID NO: 12379 - RNA, 19 nt, Artificial Sequence
  Synthetic
ccgaauacuaccaagaaaa

SEQ ID NO: 12380 - RNA, 19 nt, Artificial Sequence
  Synthetic
caggaaugccagagcugaa

SEQ ID NO: 12381 - RNA, 19 nt, Artificial Sequence
  Synthetic
uugcagcaguagagaagaa

SEQ ID NO: 12382 - RNA, 19 nt, Artificial Sequence
  Synthetic
uaucugggcaguaggaaua

SEQ ID NO: 12383 - RNA, 19 nt, Artificial Sequence
  Synthetic
cccagaaguugcagcagua

SEQ ID NO: 12384 - RNA, 19 nt, Artificial Sequence
  Synthetic
guacagggcuccagaaauu

SEQ ID NO: 12385 - RNA, 19 nt, Artificial Sequence
  Synthetic
cagcagaucauuuaggaaa

SEQ ID NO: 12386 - RNA, 19 nt, Artificial Sequence
  Synthetic
guacaggaccucauggaaa

SEQ ID NO: 12387 - RNA, 19 nt, Artificial Sequence
  Synthetic
ucgaguagcuaucaagaaa

SEQ ID NO: 12388 - RNA, 19 nt, Artificial Sequence
  Synthetic
cugcuaauaugaacagaaa

SEQ ID NO: 12389 - RNA, 19 nt, Artificial Sequence
  Synthetic
ggagaauggguuauauaaa

SEQ ID NO: 12390 - RNA, 19 nt, Artificial Sequence
  Synthetic
acacaagaggauugaagua

SEQ ID NO: 12391 - RNA, 19 nt, Artificial Sequence
  Synthetic
caacaaaguucgaguagcu

SEQ ID NO: 12392 - RNA, 19 nt, Artificial Sequence
  Synthetic
ggaaaagcucaaagaacua

SEQ ID NO: 12393 - RNA, 19 nt, Artificial Sequence
  Synthetic
agcaggagcuuguggaaau

SEQ ID NO: 12394 - RNA, 19 nt, Artificial Sequence
  Synthetic
caagaggauugaaguagaa

SEQ ID NO: 12395 - RNA, 19 nt, Artificial Sequence
  Synthetic
acccauaucuggagcagua

SEQ ID NO: 12396 - RNA, 19 nt, Artificial Sequence
  Synthetic
ccaucgagcaaaugaaaga

SEQ ID NO: 12397 - RNA, 19 nt, Artificial Sequence
  Synthetic
ugacauuauucgagcacca

SEQ ID NO: 12398 - RNA, 19 nt, Artificial Sequence
  Synthetic
gcuucagacaugagaacau

SEQ ID NO: 12399 - RNA, 19 nt, Artificial Sequence
  Synthetic
ugagagaaguacaaagguu

SEQ ID NO: 12400 - RNA, 19 nt, Artificial Sequence
  Synthetic
cauauacgcccuugagcua

SEQ ID NO: 12401 - RNA, 19 nt, Artificial Sequence
  Synthetic
gcuaauaugaacagaaaug

SEQ ID NO: 12402 - RNA, 19 nt, Artificial Sequence
  Synthetic
ccuuugagcaccagaccua

SEQ ID NO: 12403 - RNA, 19 nt, Artificial Sequence
  Synthetic
gcuaggaacuauuugcuuu

SEQ ID NO: 12404 - RNA, 19 nt, Artificial Sequence
  Synthetic
aagaagaccugaauuguau

SEQ ID NO: 12405 - RNA, 19 nt, Artificial Sequence
  Synthetic
acaagaggauugaaguaga

SEQ ID NO: 12406 - RNA, 19 nt, Artificial Sequence
  Synthetic
ucucaagaucugugacuuu

SEQ ID NO: 12407 - RNA, 19 nt, Artificial Sequence
  Synthetic
agacacaacaccucagcaa

SEQ ID NO: 12408 - RNA, 19 nt, Artificial Sequence
  Synthetic
aggaaaagcucaaagaacu

SEQ ID NO: 12409 - RNA, 19 nt, Artificial Sequence
  Synthetic
acuaauugcuuucugguuu

SEQ ID NO: 12410 - RNA, 19 nt, Artificial Sequence
  Synthetic
cgagcaaaugaaagaugua

SEQ ID NO: 12411 - RNA, 19 nt, Artificial Sequence
  Synthetic
uguugaauuccaagggcua

SEQ ID NO: 12412 - RNA, 19 nt, Artificial Sequence
  Synthetic
caagaagaccugaauugua

SEQ ID NO: 12413 - RNA, 19 nt, Artificial Sequence
  Synthetic
uauaaagacugccugcuaa

SEQ ID NO: 12414 - RNA, 19 nt, Artificial Sequence
  Synthetic
gcaagaaacuguugaauua

SEQ ID NO: 12415 - RNA, 19 nt, Artificial Sequence
  Synthetic
ggaaagaacuuaucuacaa

SEQ ID NO: 12416 - RNA, 19 nt, Artificial Sequence
  Synthetic
cggaauggcuagugugaga

SEQ ID NO: 12417 - RNA, 19 nt, Artificial Sequence
  Synthetic
ggaauaagguaauugaaca

SEQ ID NO: 12418 - RNA, 19 nt, Artificial Sequence
  Synthetic
ggcaagaguucuaaggaau

SEQ ID NO: 12419 - RNA, 19 nt, Artificial Sequence
  Synthetic
ggagagaauccaagccuaa

SEQ ID NO: 12420 - RNA, 19 nt, Artificial Sequence
  Synthetic
caaagaugcuagugauuga

SEQ ID NO: 12421 - RNA, 19 nt, Artificial Sequence
  Synthetic
aaacaagggauucgauaaa

SEQ ID NO: 12422 - RNA, 19 nt, Artificial Sequence
  Synthetic
ccuccuagcauguagaaua

SEQ ID NO: 12423 - RNA, 19 nt, Artificial Sequence
  Synthetic
agaaaugguucgccacaaa

SEQ ID NO: 12424 - RNA, 19 nt, Artificial Sequence
  Synthetic
ggaauuagaccaugagcga

SEQ ID NO: 12425 - RNA, 19 nt, Artificial Sequence
  Synthetic
guccagaauucaugaagaa

SEQ ID NO: 12426 - RNA, 19 nt, Artificial Sequence
  Synthetic
gagaugaugugauggaaca

SEQ ID NO: 12427 - RNA, 19 nt, Artificial Sequence
  Synthetic
gcuccaggcuagugugaga

SEQ ID NO: 12428 - RNA, 19 nt, Artificial Sequence
  Synthetic
aauuagaccaugagcgaau

SEQ ID NO: 12429 - RNA, 19 nt, Artificial Sequence
  Synthetic
ggaaugugguuaaugaaaa

SEQ ID NO: 12430 - RNA, 19 nt, Artificial Sequence
  Synthetic
acaaggagaacguggauau

SEQ ID NO: 12431 - RNA, 19 nt, Artificial Sequence
  Synthetic
uaagaaacuauguggagaa

SEQ ID NO: 12432 - RNA, 19 nt, Artificial Sequence
  Synthetic
gggaugggcuacaaggaga

SEQ ID NO: 12433 - RNA, 19 nt, Artificial Sequence
  Synthetic
guuccaagauguuuacuua

SEQ ID NO: 12434 - RNA, 19 nt, Artificial Sequence
  Synthetic
ccagaauucaugaagaaau

SEQ ID NO: 12435 - RNA, 19 nt, Artificial Sequence
  Synthetic
acacacaaaugcagacaca

SEQ ID NO: 12436 - RNA, 19 nt, Artificial Sequence
  Synthetic
gaccaguggaauaagguaa

SEQ ID NO: 12437 - RNA, 19 nt, Artificial Sequence
  Synthetic
agagaagccuuuuccauaa

SEQ ID NO: 12438 - RNA, 19 nt, Artificial Sequence
  Synthetic
aaacaaguagggaggauuu

SEQ ID NO: 12439 - RNA, 19 nt, Artificial Sequence
  Synthetic
caaguaacauuguagucaa

SEQ ID NO: 12440 - RNA, 19 nt, Artificial Sequence
  Synthetic
cuacaaggaaguaaugaau

SEQ ID NO: 12441 - RNA, 19 nt, Artificial Sequence
  Synthetic
ccucagggcucuaccaaga

SEQ ID NO: 12442 - RNA, 19 nt, Artificial Sequence
  Synthetic
gcagugaacagcagugaga

SEQ ID NO: 12443 - RNA, 19 nt, Artificial Sequence
  Synthetic
agaaaacgcuggaggaguu

SEQ ID NO: 12444 - RNA, 19 nt, Artificial Sequence
  Synthetic
gcccugagguucuggcaaa

SEQ ID NO: 12445 - RNA, 19 nt, Artificial Sequence
  Synthetic
agccagaggccgagccaua

SEQ ID NO: 12446 - RNA, 19 nt, Artificial Sequence
  Synthetic
agaagguggcggugaagaa

SEQ ID NO: 12447 - RNA, 19 nt, Artificial Sequence
  Synthetic
cggcaggagcugaacaaga

SEQ ID NO: 12448 - RNA, 19 nt, Artificial Sequence
  Synthetic
augagagcguugaggccaa

SEQ ID NO: 12449 - RNA, 19 nt, Artificial Sequence
  Synthetic
ccaggugucaaaugagaaa

SEQ ID NO: 12450 - RNA, 19 nt, Artificial Sequence
  Synthetic
gcaacguggcugugaacga

SEQ ID NO: 12451 - RNA, 19 nt, Artificial Sequence
  Synthetic
cagaaggaccugagcagca

SEQ ID NO: 12452 - RNA, 19 nt, Artificial Sequence
  Synthetic
gcgacgagcacguucaauu

SEQ ID NO: 12453 - RNA, 19 nt, Artificial Sequence
  Synthetic
acaaccaaacaguggauau

SEQ ID NO: 12454 - RNA, 19 nt, Artificial Sequence
  Synthetic
aggaugagccagaggccga

SEQ ID NO: 12455 - RNA, 19 nt, Artificial Sequence
  Synthetic
gcacgcuggaggaguggaa

SEQ ID NO: 12456 - RNA, 19 nt, Artificial Sequence
  Synthetic
ugaacaagaccguguggga

SEQ ID NO: 12457 - RNA, 19 nt, Artificial Sequence
  Synthetic
ccauagaccuccuuggaag

SEQ ID NO: 12458 - RNA, 19 nt, Artificial Sequence
  Synthetic
gcgccgaccugaacaacau

SEQ ID NO: 12459 - RNA, 19 nt, Artificial Sequence
  Synthetic
acgaggagaugaccggcua

SEQ ID NO: 12460 - RNA, 19 nt, Artificial Sequence
  Synthetic
ucauggaaguggugggcac

SEQ ID NO: 12461 - RNA, 19 nt, Artificial Sequence
  Synthetic
aggccgagccauaugauga

SEQ ID NO: 12462 - RNA, 19 nt, Artificial Sequence
  Synthetic
gaaggaugcuggugcugga

SEQ ID NO: 12463 - RNA, 19 nt, Artificial Sequence
  Synthetic
cuggcagccuggagauuga

SEQ ID NO: 12464 - RNA, 19 nt, Artificial Sequence
  Synthetic
cccaaggccagcagccaua

SEQ ID NO: 12465 - RNA, 19 nt, Artificial Sequence
  Synthetic
ggaaggagcucacuuacca

SEQ ID NO: 12466 - RNA, 19 nt, Artificial Sequence
  Synthetic
ggagaaucuacacgcauga

SEQ ID NO: 12467 - RNA, 19 nt, Artificial Sequence
  Synthetic
ucaacuggaugcauuacaa

SEQ ID NO: 12468 - RNA, 19 nt, Artificial Sequence
  Synthetic
gcugaagcgcaucauggaa

SEQ ID NO: 12469 - RNA, 19 nt, Artificial Sequence
  Synthetic
ggagcucacuuaccaggaa

SEQ ID NO: 12470 - RNA, 19 nt, Artificial Sequence
  Synthetic
guaccgggcaccugagauc

SEQ ID NO: 12471 - RNA, 19 nt, Artificial Sequence
  Synthetic
cuggaugcauuacaaccaa

SEQ ID NO: 12472 - RNA, 19 nt, Artificial Sequence
  Synthetic
caaccaaacaguggauauc

SEQ ID NO: 12473 - RNA, 19 nt, Artificial Sequence
  Synthetic
ugucagggcacaugugaug

SEQ ID NO: 12474 - RNA, 19 nt, Artificial Sequence
  Synthetic
gcgaugaggccaagaacaa

SEQ ID NO: 12475 - RNA, 19 nt, Artificial Sequence
  Synthetic
gcgcuaagguggccaucaa

SEQ ID NO: 12476 - RNA, 19 nt, Artificial Sequence
  Synthetic
gaugaauggaagcguguua

SEQ ID NO: 12477 - RNA, 19 nt, Artificial Sequence
  Synthetic
acaaagaggugcucagcuu

SEQ ID NO: 12478 - RNA, 19 nt, Artificial Sequence
  Synthetic
cugaaggggcugagguaua

SEQ ID NO: 12479 - RNA, 19 nt, Artificial Sequence
  Synthetic
ugggcaagcucaugaaaca

SEQ ID NO: 12480 - RNA, 19 nt, Artificial Sequence
  Synthetic
ccgaauuggagaagaagga

SEQ ID NO: 12481 - RNA, 19 nt, Artificial Sequence
  Synthetic
gaauuggagaagaaggauu

SEQ ID NO: 12482 - RNA, 19 nt, Artificial Sequence
  Synthetic
cggagaugaucacaggcaa

SEQ ID NO: 12483 - RNA, 19 nt, Artificial Sequence
  Synthetic
gcacacuggaugaauggaa

SEQ ID NO: 12484 - RNA, 19 nt, Artificial Sequence
  Synthetic
cugaugagacccuggauga

SEQ ID NO: 12485 - RNA, 19 nt, Artificial Sequence
  Synthetic
acgaagacugugagcugaa

SEQ ID NO: 12486 - RNA, 19 nt, Artificial Sequence
  Synthetic
gaacgaagacugugagcug

SEQ ID NO: 12487 - RNA, 19 nt, Artificial Sequence
  Synthetic
aauuggagaagaaggauuu

SEQ ID NO: 12488 - RNA, 19 nt, Artificial Sequence
  Synthetic
agaacaacaugaagggccu

SEQ ID NO: 12489 - RNA, 19 nt, Artificial Sequence
  Synthetic
aaggagaucaugaagguga

SEQ ID NO: 12490 - RNA, 19 nt, Artificial Sequence
  Synthetic
agaagaugcuggugcugga

SEQ ID NO: 12491 - RNA, 19 nt, Artificial Sequence
  Synthetic
aguccgagcuguucgccaa

SEQ ID NO: 12492 - RNA, 19 nt, Artificial Sequence
  Synthetic
uggaccagcugaaggagau

SEQ ID NO: 12493 - RNA, 19 nt, Artificial Sequence
  Synthetic
gcacaugcgccacgagaac

SEQ ID NO: 12494 - RNA, 19 nt, Artificial Sequence
  Synthetic
gaagcguguuacuuacaaa

SEQ ID NO: 12495 - RNA, 19 nt, Artificial Sequence
  Synthetic
ugaaggagaucaugaaggu

SEQ ID NO: 12496 - RNA, 19 nt, Artificial Sequence
  Synthetic
agcugaagauccuggacuu

SEQ ID NO: 12497 - RNA, 19 nt, Artificial Sequence
  Synthetic
aggccaagaacaacaugaa

SEQ ID NO: 12498 - RNA, 19 nt, Artificial Sequence
  Synthetic
aauggaagcguguuacuua

SEQ ID NO: 12499 - RNA, 19 nt, Artificial Sequence
  Synthetic
cuaagguggccaucaagaa

SEQ ID NO: 12500 - RNA, 19 nt, Artificial Sequence
  Synthetic
cagcugaaggagaucauga

SEQ ID NO: 12501 - RNA, 19 nt, Artificial Sequence
  Synthetic
uggaugacuucacggacuu

SEQ ID NO: 12502 - RNA, 19 nt, Artificial Sequence
  Synthetic
ccaggcaggcagacaguga

SEQ ID NO: 12503 - RNA, 19 nt, Artificial Sequence
  Synthetic
ggauccaguuccucgugua

SEQ ID NO: 12504 - RNA, 19 nt, Artificial Sequence
  Synthetic
gggagaagguggccaucaa

SEQ ID NO: 12505 - RNA, 19 nt, Artificial Sequence
  Synthetic
ggaaaugggccuaguagau

SEQ ID NO: 12506 - RNA, 19 nt, Artificial Sequence
  Synthetic
ccuuagaacacgagaaacu

SEQ ID NO: 12507 - RNA, 19 nt, Artificial Sequence
  Synthetic
agaagaugcuggagcuaga

SEQ ID NO: 12508 - RNA, 19 nt, Artificial Sequence
  Synthetic
gugcagaagcugaacgaca

SEQ ID NO: 12509 - RNA, 19 nt, Artificial Sequence
  Synthetic
gcucaaaggccuuaaguac

SEQ ID NO: 12510 - RNA, 19 nt, Artificial Sequence
  Synthetic
gauugaaacagcagaacuu

SEQ ID NO: 12511 - RNA, 19 nt, Artificial Sequence
  Synthetic
agagaugcugacagggaaa

SEQ ID NO: 12512 - RNA, 19 nt, Artificial Sequence
  Synthetic
ggaaagauuaccuggacca

SEQ ID NO: 12513 - RNA, 19 nt, Artificial Sequence
  Synthetic
cugcggaccugcuggagaa

SEQ ID NO: 12514 - RNA, 19 nt, Artificial Sequence
  Synthetic
aggaagagacggaggccca

SEQ ID NO: 12515 - RNA, 19 nt, Artificial Sequence
  Synthetic
cagcacaucuacaaggaga

SEQ ID NO: 12516 - RNA, 19 nt, Artificial Sequence
  Synthetic
cgagaaacucacaguggau

SEQ ID NO: 12517 - RNA, 19 nt, Artificial Sequence
  Synthetic
caaaccugguggauugaaa

SEQ ID NO: 12518 - RNA, 19 nt, Artificial Sequence
  Synthetic
ccuaguagaugcagaauuc

SEQ ID NO: 12519 - RNA, 19 nt, Artificial Sequence
  Synthetic
uaacaacagucauuggauu

SEQ ID NO: 12520 - RNA, 19 nt, Artificial Sequence
  Synthetic
ugcagaagcugaacgacaa

SEQ ID NO: 12521 - RNA, 19 nt, Artificial Sequence
  Synthetic
gaacugaagauucuggauu

SEQ ID NO: 12522 - RNA, 19 nt, Artificial Sequence
  Synthetic
gggaugcucuaacgaauua

SEQ ID NO: 12523 - RNA, 19 nt, Artificial Sequence
  Synthetic
gcagaagcugaacgacaaa

SEQ ID NO: 12524 - RNA, 19 nt, Artificial Sequence
  Synthetic
ucaaaggccuuaaguacau

SEQ ID NO: 12525 - RNA, 19 nt, Artificial Sequence
  Synthetic
ucacaguggaugaauggaa

SEQ ID NO: 12526 - RNA, 19 nt, Artificial Sequence
  Synthetic
cagagaugcugacagggaa

SEQ ID NO: 12527 - RNA, 19 nt, Artificial Sequence
  Synthetic
gcagagaugcugacaggga

SEQ ID NO: 12528 - RNA, 19 nt, Artificial Sequence
  Synthetic
cggaccugcuggagaagau

SEQ ID NO: 12529 - RNA, 19 nt, Artificial Sequence
  Synthetic
ggagaagaugcuggagcua

SEQ ID NO: 12530 - RNA, 19 nt, Artificial Sequence
  Synthetic
gcaaccuggcugugaauga

SEQ ID NO: 12531 - RNA, 19 nt, Artificial Sequence
  Synthetic
ucuacaagcaggacgucaa

SEQ ID NO: 12532 - RNA, 19 nt, Artificial Sequence
  Synthetic
aacugaagauucuggauuu

SEQ ID NO: 12533 - RNA, 19 nt, Artificial Sequence
  Synthetic
gggagaaacuagcucugau

SEQ ID NO: 12534 - RNA, 19 nt, Artificial Sequence
  Synthetic
aaagagagaaugagggaaa

SEQ ID NO: 12535 - RNA, 19 nt, Artificial Sequence
  Synthetic
gggcugagcuuuugaagaa

SEQ ID NO: 12536 - RNA, 19 nt, Artificial Sequence
  Synthetic
gaggaauuaucaugggaaa

SEQ ID NO: 12537 - RNA, 19 nt, Artificial Sequence
  Synthetic
uguaaaugcucgugugauu

SEQ ID NO: 12538 - RNA, 19 nt, Artificial Sequence
  Synthetic
gguaagacaauaugaacaa

SEQ ID NO: 12539 - RNA, 19 nt, Artificial Sequence
  Synthetic
aggaacagguggauguaua

SEQ ID NO: 12540 - RNA, 19 nt, Artificial Sequence
  Synthetic
ggaauauguucaaugcaaa

SEQ ID NO: 12541 - RNA, 19 nt, Artificial Sequence
  Synthetic
gcuaagaaaugcugaaaau

SEQ ID NO: 12542 - RNA, 19 nt, Artificial Sequence
  Synthetic
gugaaaugucagaagcuua

SEQ ID NO: 12543 - RNA, 19 nt, Artificial Sequence
  Synthetic
ccaaauucuccgaggucua

SEQ ID NO: 12544 - RNA, 19 nt, Artificial Sequence
  Synthetic
agaagaaaguguagauagu

SEQ ID NO: 12545 - RNA, 19 nt, Artificial Sequence
  Synthetic
gggcagaucugaacaacau

SEQ ID NO: 12546 - RNA, 19 nt, Artificial Sequence
  Synthetic
gauauuauggcaagugaua

SEQ ID NO: 12547 - RNA, 19 nt, Artificial Sequence
  Synthetic
aggaauauguucaaugcaa

SEQ ID NO: 12548 - RNA, 19 nt, Artificial Sequence
  Synthetic
gcagagguuucuugaauau

SEQ ID NO: 12549 - RNA, 19 nt, Artificial Sequence
  Synthetic
ucucagaucuugacaguau

SEQ ID NO: 12550 - RNA, 19 nt, Artificial Sequence
  Synthetic
gcauaauggccgagcuguu

SEQ ID NO: 12551 - RNA, 19 nt, Artificial Sequence
  Synthetic
gaagaugaacuuugcgaau

SEQ ID NO: 12552 - RNA, 19 nt, Artificial Sequence
  Synthetic
gggauuugaagaagaguuu

SEQ ID NO: 12553 - RNA, 19 nt, Artificial Sequence
  Synthetic
ccuaaaaccuaguaaucua

SEQ ID NO: 12554 - RNA, 19 nt, Artificial Sequence
  Synthetic
ggagaaagggcaaauuauu

SEQ ID NO: 12555 - RNA, 19 nt, Artificial Sequence
  Synthetic
ccacgauccugaugaugaa

SEQ ID NO: 12556 - RNA, 19 nt, Artificial Sequence
  Synthetic
gugcagagguuucuugaau

SEQ ID NO: 12557 - RNA, 19 nt, Artificial Sequence
  Synthetic
agaaauacugcucugaaua

SEQ ID NO: 12558 - RNA, 19 nt, Artificial Sequence
  Synthetic
gcacacagaugaugaaaug

SEQ ID NO: 12559 - RNA, 19 nt, Artificial Sequence
  Synthetic
gagagaagaaaguguagau

SEQ ID NO: 12560 - RNA, 19 nt, Artificial Sequence
  Synthetic
gaacagaaaacaaaagaga

SEQ ID NO: 12561 - RNA, 19 nt, Artificial Sequence
  Synthetic
ucuccgaggucuaaaguau

SEQ ID NO: 12562 - RNA, 19 nt, Artificial Sequence
  Synthetic
ggaauucaaugauguguau

SEQ ID NO: 12563 - RNA, 19 nt, Artificial Sequence
  Synthetic
ccuaugaccacgugcgcaa

SEQ ID NO: 12564 - RNA, 19 nt, Artificial Sequence
  Synthetic
ccuuaagauuugugauuuc

SEQ ID NO: 12565 - RNA, 19 nt, Artificial Sequence
  Synthetic
ccuucgaacaucagaccua

SEQ ID NO: 12566 - RNA, 19 nt, Artificial Sequence
  Synthetic
gggagguggagauggugaa

SEQ ID NO: 12567 - RNA, 19 nt, Artificial Sequence
  Synthetic
gaccuuaagauuugugauu

SEQ ID NO: 12568 - RNA, 19 nt, Artificial Sequence
  Synthetic
cuguacaaguugcugaaaa

SEQ ID NO: 12569 - RNA, 19 nt, Artificial Sequence
  Synthetic
agacugaccuguacaaguu

SEQ ID NO: 12570 - RNA, 19 nt, Artificial Sequence
  Synthetic
gcaaugaccauaucugcua

SEQ ID NO: 12571 - RNA, 19 nt, Artificial Sequence
  Synthetic
cugcuggaccggauguuaa

SEQ ID NO: 12572 - RNA, 19 nt, Artificial Sequence
  Synthetic
cccuggaagccaugagaga

SEQ ID NO: 12573 - RNA, 19 nt, Artificial Sequence
  Synthetic
ccaacgugcuccaccgaga

SEQ ID NO: 12574 - RNA, 19 nt, Artificial Sequence
  Synthetic
gcgcuuccgccaugagaau

SEQ ID NO: 12575 - RNA, 19 nt, Artificial Sequence
  Synthetic
aggaggaccugaauuguau

SEQ ID NO: 12576 - RNA, 19 nt, Artificial Sequence
  Synthetic
gggccaagcuuuuccccaa

SEQ ID NO: 12577 - RNA, 19 nt, Artificial Sequence
  Synthetic
ccauggagcuggaugaccu

SEQ ID NO: 12578 - RNA, 19 nt, Artificial Sequence
  Synthetic
gcuacacgcaguugcagua

SEQ ID NO: 12579 - RNA, 19 nt, Artificial Sequence
  Synthetic
cuaaggagcggcugaagga

SEQ ID NO: 12580 - RNA, 19 nt, Artificial Sequence
  Synthetic
gaaacuaccuacagucucu

SEQ ID NO: 12581 - RNA, 19 nt, Artificial Sequence
  Synthetic
agaucaugcugaacuccaa

SEQ ID NO: 12582 - RNA, 19 nt, Artificial Sequence
  Synthetic
gcaagcacuaccuggauca

SEQ ID NO: 12583 - RNA, 19 nt, Artificial Sequence
  Synthetic
acacgcaguugcaguacau

SEQ ID NO: 12584 - RNA, 19 nt, Artificial Sequence
  Synthetic
ccgaggagcccuucaccuu

SEQ ID NO: 12585 - RNA, 19 nt, Artificial Sequence
  Synthetic
gaccggauguuaaccuuua

SEQ ID NO: 12586 - RNA, 19 nt, Artificial Sequence
  Synthetic
acuaugacccgacggauga

SEQ ID NO: 12587 - RNA, 19 nt, Artificial Sequence
  Synthetic
ugauggagacugaccugua

SEQ ID NO: 12588 - RNA, 19 nt, Artificial Sequence
  Synthetic
ccaauaaacggaucacagu

SEQ ID NO: 12589 - RNA, 19 nt, Artificial Sequence
  Synthetic
ccggcuuccugacggagua

SEQ ID NO: 12590 - RNA, 19 nt, Artificial Sequence
  Synthetic
gcguggccaucaagaagau

SEQ ID NO: 12591 - RNA, 19 nt, Artificial Sequence
  Synthetic
acaugaaggcccgaaacua

SEQ ID NO: 12592 - RNA, 19 nt, Artificial Sequence
  Synthetic
gaccugaauuguaucauca

SEQ ID NO: 12593 - RNA, 19 nt, Artificial Sequence
  Synthetic
ccagaaagguaggaagaua

SEQ ID NO: 12594 - RNA, 19 nt, Artificial Sequence
  Synthetic
ccauagagcaaauguguua

SEQ ID NO: 12595 - RNA, 19 nt, Artificial Sequence
  Synthetic
cggagaaucugcagaggua

SEQ ID NO: 12596 - RNA, 19 nt, Artificial Sequence
  Synthetic
cagaaggguugguaacaaa

SEQ ID NO: 12597 - RNA, 19 nt, Artificial Sequence
  Synthetic
ccuuaaaucuaaucagcaa

SEQ ID NO: 12598 - RNA, 19 nt, Artificial Sequence
  Synthetic
gcacugaccugcaggguga

SEQ ID NO: 12599 - RNA, 19 nt, Artificial Sequence
  Synthetic
cugcagagguagcucgaaa

SEQ ID NO: 12600 - RNA, 19 nt, Artificial Sequence
  Synthetic
gagaagauccugaccuuua

SEQ ID NO: 12601 - RNA, 19 nt, Artificial Sequence
  Synthetic
gggaagaacgcuuuagaca

SEQ ID NO: 12602 - RNA, 19 nt, Artificial Sequence
  Synthetic
ggaaggucgcugugaagaa

SEQ ID NO: 12603 - RNA, 19 nt, Artificial Sequence
  Synthetic
cguacaucguccaggagua

SEQ ID NO: 12604 - RNA, 19 nt, Artificial Sequence
  Synthetic
auggagaccucaugacaaa

SEQ ID NO: 12605 - RNA, 19 nt, Artificial Sequence
  Synthetic
gcaacacauuagaaacuua

SEQ ID NO: 12606 - RNA, 19 nt, Artificial Sequence
  Synthetic
gggaggaagacaaggacga

SEQ ID NO: 12607 - RNA, 19 nt, Artificial Sequence
  Synthetic
gagcaauguuucuuguauu

SEQ ID NO: 12608 - RNA, 19 nt, Artificial Sequence
  Synthetic
ccacaaggguuaucuguca

SEQ ID NO: 12609 - RNA, 19 nt, Artificial Sequence
  Synthetic
gcauugaggaugagaucga

SEQ ID NO: 12610 - RNA, 19 nt, Artificial Sequence
  Synthetic
ccaacauccuucaucaaua

SEQ ID NO: 12611 - RNA, 19 nt, Artificial Sequence
  Synthetic
gaccaggaguucauauaua

SEQ ID NO: 12612 - RNA, 19 nt, Artificial Sequence
  Synthetic
gcaaauguguuaggagaga

SEQ ID NO: 12613 - RNA, 19 nt, Artificial Sequence
  Synthetic
cuguaauccgggaggaaga

SEQ ID NO: 12614 - RNA, 19 nt, Artificial Sequence
  Synthetic
aggaugagaucgacgacau

SEQ ID NO: 12615 - RNA, 19 nt, Artificial Sequence
  Synthetic
caaggaauccagaaaggua

SEQ ID NO: 12616 - RNA, 19 nt, Artificial Sequence
  Synthetic
uggagaagauccugaccuu

SEQ ID NO: 12617 - RNA, 19 nt, Artificial Sequence
  Synthetic
gaucaggucaggccaaaua

SEQ ID NO: 12618 - RNA, 19 nt, Artificial Sequence
  Synthetic
cagugaagccaucgacuuu

SEQ ID NO: 12619 - RNA, 19 nt, Artificial Sequence
  Synthetic
cccaugagcuggagcagau

SEQ ID NO: 12620 - RNA, 19 nt, Artificial Sequence
  Synthetic
acaacaagccgcaccacua

SEQ ID NO: 12621 - RNA, 19 nt, Artificial Sequence
  Synthetic
uaagaaggguucaggaaac

SEQ ID NO: 12622 - RNA, 19 nt, Artificial Sequence
  Synthetic
agagguagcucgaaaccau

SEQ ID NO: 12623 - RNA, 19 nt, Artificial Sequence
  Synthetic
ggagagaggacaugaggaa

SEQ ID NO: 12624 - RNA, 19 nt, Artificial Sequence
  Synthetic
agacaaugacugugacaaa

SEQ ID NO: 12625 - RNA, 19 nt, Artificial Sequence
  Synthetic
ccagauagcgcuagaggaa

SEQ ID NO: 12626 - RNA, 19 nt, Artificial Sequence
  Synthetic
gaacaaguugagaaggaaa

SEQ ID NO: 12627 - RNA, 19 nt, Artificial Sequence
  Synthetic
ggagagagagugaaguuaa

SEQ ID NO: 12628 - RNA, 19 nt, Artificial Sequence
  Synthetic
gaucuggguucuagguaua

SEQ ID NO: 12629 - RNA, 19 nt, Artificial Sequence
  Synthetic
cggaagacuuggugcugaa

SEQ ID NO: 12630 - RNA, 19 nt, Artificial Sequence
  Synthetic
aggaaggauuucugaacaa

SEQ ID NO: 12631 - RNA, 19 nt, Artificial Sequence
  Synthetic
aggaauuagucgagaagca

SEQ ID NO: 12632 - RNA, 19 nt, Artificial Sequence
  Synthetic
ggaaagaagauacugaaau

SEQ ID NO: 12633 - RNA, 19 nt, Artificial Sequence
  Synthetic
cugaaaugcugacugguaa

SEQ ID NO: 12634 - RNA, 19 nt, Artificial Sequence
  Synthetic
cuacugauguuguugauaa

SEQ ID NO: 12635 - RNA, 19 nt, Artificial Sequence
  Synthetic
gaucuggaguguagccaua

SEQ ID NO: 12636 - RNA, 19 nt, Artificial Sequence
  Synthetic
ccaugauaacauugugaaa

SEQ ID NO: 12637 - RNA, 19 nt, Artificial Sequence
  Synthetic
gguaaggaaggaugaacaa

SEQ ID NO: 12638 - RNA, 19 nt, Artificial Sequence
  Synthetic
gaaagaagauacugaaaug

SEQ ID NO: 12639 - RNA, 19 nt, Artificial Sequence
  Synthetic
gaaaauauuuggauggaga

SEQ ID NO: 12640 - RNA, 19 nt, Artificial Sequence
  Synthetic
cugaaaugcuagaaacuga

SEQ ID NO: 12641 - RNA, 19 nt, Artificial Sequence
  Synthetic
ugugaaaguguuugagauu

SEQ ID NO: 12642 - RNA, 19 nt, Artificial Sequence
  Synthetic
aggaguacauggagacaga

SEQ ID NO: 12643 - RNA, 19 nt, Artificial Sequence
  Synthetic
cugaaggauugguuacuaa

SEQ ID NO: 12644 - RNA, 19 nt, Artificial Sequence
  Synthetic
gaaaagaaagggaaaagaa

SEQ ID NO: 12645 - RNA, 19 nt, Artificial Sequence
  Synthetic
gauaagaaaggcaaaucaa

SEQ ID NO: 12646 - RNA, 19 nt, Artificial Sequence
  Synthetic
gcacagagaucucaaacca

SEQ ID NO: 12647 - RNA, 19 nt, Artificial Sequence
  Synthetic
aagaagaaguacaaguuga

SEQ ID NO: 12648 - RNA, 19 nt, Artificial Sequence
  Synthetic
aggaaagaagauacugaaa

SEQ ID NO: 12649 - RNA, 19 nt, Artificial Sequence
  Synthetic
aagaguagccaucaagaaa

SEQ ID NO: 12650 - RNA, 19 nt, Artificial Sequence
  Synthetic
cagagaaauuugaaagucu

SEQ ID NO: 12651 - RNA, 19 nt, Artificial Sequence
  Synthetic
caaacaugcucuacgugaa

SEQ ID NO: 12652 - RNA, 19 nt, Artificial Sequence
  Synthetic
gaaaggaauggauugguua

SEQ ID NO: 12653 - RNA, 19 nt, Artificial Sequence
  Synthetic
gcucaagauuggugacuuu

SEQ ID NO: 12654 - RNA, 19 nt, Artificial Sequence
  Synthetic
gcuuugaccuggaggaauu

SEQ ID NO: 12655 - RNA, 19 nt, Artificial Sequence
  Synthetic
gaacaauccuuuucaguau

SEQ ID NO: 12656 - RNA, 19 nt, Artificial Sequence
  Synthetic
aaaugaggccugugaaaua

SEQ ID NO: 12657 - RNA, 19 nt, Artificial Sequence
  Synthetic
ccgcagaggagcagagguu

SEQ ID NO: 12658 - RNA, 19 nt, Artificial Sequence
  Synthetic
uggcugaaauugaggacuu

SEQ ID NO: 12659 - RNA, 19 nt, Artificial Sequence
  Synthetic
gggccuauauccagagcuu

SEQ ID NO: 12660 - RNA, 19 nt, Artificial Sequence
  Synthetic
ggauuauucugcagguuca

SEQ ID NO: 12661 - RNA, 19 nt, Artificial Sequence
  Synthetic
caaaaugaggccugugaaa

SEQ ID NO: 12662 - RNA, 19 nt, Artificial Sequence
  Synthetic
gggaaucgcgggacagaca

SEQ ID NO: 12663 - RNA, 19 nt, Artificial Sequence
  Synthetic
gcucagugacaaugacaga

SEQ ID NO: 12664 - RNA, 19 nt, Artificial Sequence
  Synthetic
ggacuagugcucagugaca

SEQ ID NO: 12665 - RNA, 19 nt, Artificial Sequence
  Synthetic
gagccaaggagcgggagaa

SEQ ID NO: 12666 - RNA, 19 nt, Artificial Sequence
  Synthetic
gaacaucaguacuucauga

SEQ ID NO: 12667 - RNA, 19 nt, Artificial Sequence
  Synthetic
gcaaauggcggacacaauu

SEQ ID NO: 12668 - RNA, 19 nt, Artificial Sequence
  Synthetic
ugaagauccucaagcacuu

SEQ ID NO: 12669 - RNA, 19 nt, Artificial Sequence
  Synthetic
guaccaugauccugaugau

SEQ ID NO: 12670 - RNA, 19 nt, Artificial Sequence
  Synthetic
agccaaggagcgggagaaa

SEQ ID NO: 12671 - RNA, 19 nt, Artificial Sequence
  Synthetic
ccaucaagaagaucccuaa

SEQ ID NO: 12672 - RNA, 19 nt, Artificial Sequence
  Synthetic
gaaucgcgggacagacaaa

SEQ ID NO: 12673 - RNA, 19 nt, Artificial Sequence
  Synthetic
cacuggaacacgugcgcua

SEQ ID NO: 12674 - RNA, 19 nt, Artificial Sequence
  Synthetic
accuauuggugaaugagaa

SEQ ID NO: 12675 - RNA, 19 nt, Artificial Sequence
  Synthetic
uggaggaauucuuaaacca

SEQ ID NO: 12676 - RNA, 19 nt, Artificial Sequence
  Synthetic
ccauuguggcugaaauuga

SEQ ID NO: 12677 - RNA, 19 nt, Artificial Sequence
  Synthetic
ggagcgggagcgaaaggaa

SEQ ID NO: 12678 - RNA, 19 nt, Artificial Sequence
  Synthetic
uggcuacgguguuggcuuu

SEQ ID NO: 12679 - RNA, 19 nt, Artificial Sequence
  Synthetic
aagaagaucccuaaugcuu

SEQ ID NO: 12680 - RNA, 19 nt, Artificial Sequence
  Synthetic
cagagucaccugaugucaa

SEQ ID NO: 12681 - RNA, 19 nt, Artificial Sequence
  Synthetic
ccccaggaguuuugccuua

SEQ ID NO: 12682 - RNA, 19 nt, Artificial Sequence
  Synthetic
caaacgagcggagggaaga

SEQ ID NO: 12683 - RNA, 19 nt, Artificial Sequence
  Synthetic
uggauauagcuuugagaaa

SEQ ID NO: 12684 - RNA, 19 nt, Artificial Sequence
  Synthetic
acagaaaucccuagaagaa

SEQ ID NO: 12685 - RNA, 19 nt, Artificial Sequence
  Synthetic
acacaauagaagaguggaa

SEQ ID NO: 12686 - RNA, 19 nt, Artificial Sequence
  Synthetic
cucaggagcucaaggaaua

SEQ ID NO: 12687 - RNA, 19 nt, Artificial Sequence
  Synthetic
ggagcuagaucaugaaaga

SEQ ID NO: 12688 - RNA, 19 nt, Artificial Sequence
  Synthetic
auagaagaguggaaagaau

SEQ ID NO: 12689 - RNA, 19 nt, Artificial Sequence
  Synthetic
gcaguuagaugaaagggaa

SEQ ID NO: 12690 - RNA, 19 nt, Artificial Sequence
  Synthetic
ggaacgaguuuuaugauga

SEQ ID NO: 12691 - RNA, 19 nt, Artificial Sequence
  Synthetic
aaccaagaauggaguuaua

SEQ ID NO: 12692 - RNA, 19 nt, Artificial Sequence
  Synthetic
agaaaucccuagaagaauu

SEQ ID NO: 12693 - RNA, 19 nt, Artificial Sequence
  Synthetic
cuuaaagcccaguaauaua

SEQ ID NO: 12694 - RNA, 19 nt, Artificial Sequence
  Synthetic
ggcaugggcuacaaggaaa

SEQ ID NO: 12695 - RNA, 19 nt, Artificial Sequence
  Synthetic
gacuuaaagcccaguaaua

SEQ ID NO: 12696 - RNA, 19 nt, Artificial Sequence
  Synthetic
ucacaguccugaaacgaua

SEQ ID NO: 12697 - RNA, 19 nt, Artificial Sequence
  Synthetic
agagcuaguucuuaugaaa

SEQ ID NO: 12698 - RNA, 19 nt, Artificial Sequence
  Synthetic
gaagcaagcgugacaacaa

SEQ ID NO: 12699 - RNA, 19 nt, Artificial Sequence
  Synthetic
ccaaaaugcugguaauaga

SEQ ID NO: 12700 - RNA, 19 nt, Artificial Sequence
  Synthetic
ugaaagaaauguugcaauc

SEQ ID NO: 12701 - RNA, 19 nt, Artificial Sequence
  Synthetic
caacaaacuuaaagccagu

SEQ ID NO: 12702 - RNA, 19 nt, Artificial Sequence
  Synthetic
gauauagcuuugagaaacu

SEQ ID NO: 12703 - RNA, 19 nt, Artificial Sequence
  Synthetic
gcccaguaauauaguagua

SEQ ID NO: 12704 - RNA, 19 nt, Artificial Sequence
  Synthetic
caauagaagaguggaaaga

SEQ ID NO: 12705 - RNA, 19 nt, Artificial Sequence
  Synthetic
uaucagaugcuguguggaa

SEQ ID NO: 12706 - RNA, 19 nt, Artificial Sequence
  Synthetic
agauggagcuagaucauga

SEQ ID NO: 12707 - RNA, 19 nt, Artificial Sequence
  Synthetic
acagagagcuaguucuuau

SEQ ID NO: 12708 - RNA, 19 nt, Artificial Sequence
  Synthetic
guccugaauucaugaagaa

SEQ ID NO: 12709 - RNA, 19 nt, Artificial Sequence
  Synthetic
uagaagaguggaaagaauu

SEQ ID NO: 12710 - RNA, 19 nt, Artificial Sequence
  Synthetic
gaucaauggcucucagcau

SEQ ID NO: 12711 - RNA, 19 nt, Artificial Sequence
  Synthetic
ugacaagcaguuagaugaa

SEQ ID NO: 12712 - RNA, 19 nt, Artificial Sequence
  Synthetic
gugaagaggaagagggcuu

SEQ ID NO: 12713 - RNA, 19 nt, Artificial Sequence
  Synthetic
uggaggaguuugaggauga

SEQ ID NO: 12714 - RNA, 19 nt, Artificial Sequence
  Synthetic
gggaauaaauguagccacu

SEQ ID NO: 12715 - RNA, 19 nt, Artificial Sequence
  Synthetic
cggccaucggagaggaaua

SEQ ID NO: 12716 - RNA, 19 nt, Artificial Sequence
  Synthetic
ccaaggagcccgagcacau

SEQ ID NO: 12717 - RNA, 19 nt, Artificial Sequence
  Synthetic
gaauaaauguagccacuuu

SEQ ID NO: 12718 - RNA, 19 nt, Artificial Sequence
  Synthetic
ccaccaaagcccuggcaga

SEQ ID NO: 12719 - RNA, 19 nt, Artificial Sequence
  Synthetic
ccaagaaauuccugaacgu

SEQ ID NO: 12720 - RNA, 19 nt, Artificial Sequence
  Synthetic
gcaucagcuuacagugcaa

SEQ ID NO: 12721 - RNA, 19 nt, Artificial Sequence
  Synthetic
aggacacacugaauaauaa

SEQ ID NO: 12722 - RNA, 19 nt, Artificial Sequence
  Synthetic
gauaucauccaaagaacaa

SEQ ID NO: 12723 - RNA, 19 nt, Artificial Sequence
  Synthetic
ccaucagugaagaggaaga

SEQ ID NO: 12724 - RNA, 19 nt, Artificial Sequence
  Synthetic
auaauaauucucugggcaa

SEQ ID NO: 12725 - RNA, 19 nt, Artificial Sequence
  Synthetic
gguacgaggccuacaacau

SEQ ID NO: 12726 - RNA, 19 nt, Artificial Sequence
  Synthetic
ccaaagaacaacaaguacu

SEQ ID NO: 12727 - RNA, 19 nt, Artificial Sequence
  Synthetic
ccgagaugcugcagaugga

SEQ ID NO: 12728 - RNA, 19 nt, Artificial Sequence
  Synthetic
cuccaucagugaagaggaa

SEQ ID NO: 12729 - RNA, 19 nt, Artificial Sequence
  Synthetic
gagcauuccagcaguucua

SEQ ID NO: 12730 - RNA, 19 nt, Artificial Sequence
  Synthetic
uaauaauucucugggcaaa

SEQ ID NO: 12731 - RNA, 19 nt, Artificial Sequence
  Synthetic
acaucagccuggaggaguu

SEQ ID NO: 12732 - RNA, 19 nt, Artificial Sequence
  Synthetic
aguacacgcuggugguaga

SEQ ID NO: 12733 - RNA, 19 nt, Artificial Sequence
  Synthetic
caggacacacugaauaaua

SEQ ID NO: 12734 - RNA, 19 nt, Artificial Sequence
  Synthetic
caaagaacaacaaguacuu

SEQ ID NO: 12735 - RNA, 19 nt, Artificial Sequence
  Synthetic
gggugaaguuccugggcuc

SEQ ID NO: 12736 - RNA, 19 nt, Artificial Sequence
  Synthetic
agaaauuccugaacgucuu

SEQ ID NO: 12737 - RNA, 19 nt, Artificial Sequence
  Synthetic
agauaggcgucaaggccga

SEQ ID NO: 12738 - RNA, 19 nt, Artificial Sequence
  Synthetic
acuacagugacgagaguga

SEQ ID NO: 12739 - RNA, 19 nt, Artificial Sequence
  Synthetic
aagacgaacuugagcugga

SEQ ID NO: 12740 - RNA, 19 nt, Artificial Sequence
  Synthetic
aauaauaauucucugggca

SEQ ID NO: 12741 - RNA, 19 nt, Artificial Sequence
  Synthetic
gggagaggcaaaugcaguu

SEQ ID NO: 12742 - RNA, 19 nt, Artificial Sequence
  Synthetic
ggacauaagccuggaagaa

SEQ ID NO: 12743 - RNA, 19 nt, Artificial Sequence
  Synthetic
gcguggagcugguggacau

SEQ ID NO: 12744 - RNA, 19 nt, Artificial Sequence
  Synthetic
acauaagccuggaagaauu

SEQ ID NO: 12745 - RNA, 19 nt, Artificial Sequence
  Synthetic
ggaagaauuugacgacgaa

SEQ ID NO: 12746 - RNA, 19 nt, Artificial Sequence
  Synthetic
cgaagaggacgacgaggaa

SEQ ID NO: 12747 - RNA, 19 nt, Artificial Sequence
  Synthetic
gcgccuuccuggaguacua

SEQ ID NO: 12748 - RNA, 19 nt, Artificial Sequence
  Synthetic
acaaugaagaggaggacga

SEQ ID NO: 12749 - RNA, 19 nt, Artificial Sequence
  Synthetic
aagaggacgacgaggaaga

SEQ ID NO: 12750 - RNA, 19 nt, Artificial Sequence
  Synthetic
augaagaggaggacgauga

SEQ ID NO: 12751 - RNA, 19 nt, Artificial Sequence
  Synthetic
ccgaggaggaggacgaaga

SEQ ID NO: 12752 - RNA, 19 nt, Artificial Sequence
  Synthetic
cugcaaaccuuauccucua

SEQ ID NO: 12753 - RNA, 19 nt, Artificial Sequence
  Synthetic
aaacaacaacggaggcuuu

SEQ ID NO: 12754 - RNA, 19 nt, Artificial Sequence
  Synthetic
ggacgaugaggacgaggaa

SEQ ID NO: 12755 - RNA, 19 nt, Artificial Sequence
  Synthetic
ccaagaaguuccucaaugu

SEQ ID NO: 12756 - RNA, 19 nt, Artificial Sequence
  Synthetic
acgaagaggacgacgagga

SEQ ID NO: 12757 - RNA, 19 nt, Artificial Sequence
  Synthetic
aggaugacuuccaggaguu

SEQ ID NO: 12758 - RNA, 19 nt, Artificial Sequence
  Synthetic
uugagaugaucgaugacaa

SEQ ID NO: 12759 - RNA, 19 nt, Artificial Sequence
  Synthetic
acgacgaggaagaggagga

SEQ ID NO: 12760 - RNA, 19 nt, Artificial Sequence
  Synthetic
aggaggacgaagaggacga

SEQ ID NO: 12761 - RNA, 19 nt, Artificial Sequence
  Synthetic
acacgcuggugguggauga

SEQ ID NO: 12762 - RNA, 19 nt, Artificial Sequence
  Synthetic
ugagaugaucgaugacaau

SEQ ID NO: 12763 - RNA, 19 nt, Artificial Sequence
  Synthetic
aggaagaggaggaugccga

SEQ ID NO: 12764 - RNA, 19 nt, Artificial Sequence
  Synthetic
accaagagcaccuggcgua

SEQ ID NO: 12765 - RNA, 19 nt, Artificial Sequence
  Synthetic
aguuugagaugaucgauga

SEQ ID NO: 12766 - RNA, 19 nt, Artificial Sequence
  Synthetic
cuguguugguggaggccga

SEQ ID NO: 12767 - RNA, 19 nt, Artificial Sequence
  Synthetic
gccauuucuuccagaugaa

SEQ ID NO: 12768 - RNA, 19 nt, Artificial Sequence
  Synthetic
gacauaagccuggaagaau

SEQ ID NO: 12769 - RNA, 19 nt, Artificial Sequence
  Synthetic
uccaggaguuugagaugau

SEQ ID NO: 12770 - RNA, 19 nt, Artificial Sequence
  Synthetic
uguacgacgcggucaagua

SEQ ID NO: 12771 - RNA, 19 nt, Artificial Sequence
  Synthetic
cauaagccuggaagaauuu

SEQ ID NO: 12772 - RNA, 19 nt, Artificial Sequence
  Synthetic
gcagaaaggugaggagaaa

SEQ ID NO: 12773 - RNA, 19 nt, Artificial Sequence
  Synthetic
ggagaaauucauugaguuu

SEQ ID NO: 12774 - RNA, 19 nt, Artificial Sequence
  Synthetic
ccuugaauguggugaagaa

SEQ ID NO: 12775 - RNA, 19 nt, Artificial Sequence
  Synthetic
ggugagauccuuagcauua

SEQ ID NO: 12776 - RNA, 19 nt, Artificial Sequence
  Synthetic
gcacagacuucuugcauga

SEQ ID NO: 12777 - RNA, 19 nt, Artificial Sequence
  Synthetic
ggagugacaugaagagcaa

SEQ ID NO: 12778 - RNA, 19 nt, Artificial Sequence
  Synthetic
gaacaaagcuuucggcauc

SEQ ID NO: 12779 - RNA, 19 nt, Artificial Sequence
  Synthetic
ggaaacagccagaccgaga

SEQ ID NO: 12780 - RNA, 19 nt, Artificial Sequence
  Synthetic
agaugaagaaggaguacaa

SEQ ID NO: 12781 - RNA, 19 nt, Artificial Sequence
  Synthetic
aagaagaggcggaggaugu

SEQ ID NO: 12782 - RNA, 19 nt, Artificial Sequence
  Synthetic
agaagaaagagcugcaaau

SEQ ID NO: 12783 - RNA, 19 nt, Artificial Sequence
  Synthetic
ccgagaagaagaaggccaa

SEQ ID NO: 12784 - RNA, 19 nt, Artificial Sequence
  Synthetic
ccagcaagguggugaucau

SEQ ID NO: 12785 - RNA, 19 nt, Artificial Sequence
  Synthetic
ccaaagaagaggcggagga

SEQ ID NO: 12786 - RNA, 19 nt, Artificial Sequence
  Synthetic
cagagaugauacagaccua

SEQ ID NO: 12787 - RNA, 19 nt, Artificial Sequence
  Synthetic
ggaaagaccauuggaaaga

SEQ ID NO: 12788 - RNA, 19 nt, Artificial Sequence
  Synthetic
uaggaaagaccauuggaaa

SEQ ID NO: 12789 - RNA, 19 nt, Artificial Sequence
  Synthetic
gagaagaaagagcugcaaa

SEQ ID NO: 12790 - RNA, 19 nt, Artificial Sequence
  Synthetic
ugaauguggugaagaauga

SEQ ID NO: 12791 - RNA, 19 nt, Artificial Sequence
  Synthetic
cggagaugaagaaggagua

SEQ ID NO: 12792 - RNA, 19 nt, Artificial Sequence
  Synthetic
uggaacaagagaagaaaga

SEQ ID NO: 12793 - RNA, 19 nt, Artificial Sequence
  Synthetic
guaucaaggagcuggaaga

SEQ ID NO: 12794 - RNA, 19 nt, Artificial Sequence
  Synthetic
uggugaacgugcuggagaa

SEQ ID NO: 12795 - RNA, 19 nt, Artificial Sequence
  Synthetic
ccaucaagcugaaggauuc

SEQ ID NO: 12796 - RNA, 19 nt, Artificial Sequence
  Synthetic
agaaagagcugcaaaucca

SEQ ID NO: 12797 - RNA, 19 nt, Artificial Sequence
  Synthetic
gagaagaagaagucgacca

SEQ ID NO: 12798 - RNA, 19 nt, Artificial Sequence
  Synthetic
guacagaaucggacaaaau

SEQ ID NO: 12799 - RNA, 19 nt, Artificial Sequence
  Synthetic
uuuaggagguugagagguu

SEQ ID NO: 12800 - RNA, 19 nt, Artificial Sequence
  Synthetic
ccuccuggguccugaguuu

SEQ ID NO: 12801 - RNA, 19 nt, Artificial Sequence
  Synthetic
caguaucuuuguuaggaaa

SEQ ID NO: 12802 - RNA, 19 nt, Artificial Sequence
  Synthetic
cagcagaguucaugaagaa

SEQ ID NO: 12803 - RNA, 19 nt, Artificial Sequence
  Synthetic
ugauacaguucuugggaua

SEQ ID NO: 12804 - RNA, 19 nt, Artificial Sequence
  Synthetic
ggaaagagcuaauuuacaa

SEQ ID NO: 12805 - RNA, 19 nt, Artificial Sequence
  Synthetic
gaucaguggaauaaaguua

SEQ ID NO: 12806 - RNA, 19 nt, Artificial Sequence
  Synthetic
ggaagaaagaagcaagaau

SEQ ID NO: 12807 - RNA, 19 nt, Artificial Sequence
  Synthetic
caagaaugguguuguaaaa

SEQ ID NO: 12808 - RNA, 19 nt, Artificial Sequence
  Synthetic
agaaagagaacaugcaauu

SEQ ID NO: 12809 - RNA, 19 nt, Artificial Sequence
  Synthetic
uggaauuaauggaugcuaa

SEQ ID NO: 12810 - RNA, 19 nt, Artificial Sequence
  Synthetic
gggaguugauggaaccaaa

SEQ ID NO: 12811 - RNA, 19 nt, Artificial Sequence
  Synthetic
caagauguguauuugguua

SEQ ID NO: 12812 - RNA, 19 nt, Artificial Sequence
  Synthetic
gcaagaaugguguuguaaa

SEQ ID NO: 12813 - RNA, 19 nt, Artificial Sequence
  Synthetic
ugauggaaccaaauagaaa

SEQ ID NO: 12814 - RNA, 19 nt, Artificial Sequence
  Synthetic
acaaagagaacguugauau

SEQ ID NO: 12815 - RNA, 19 nt, Artificial Sequence
  Synthetic
ccgaagucauccuggguau

SEQ ID NO: 12816 - RNA, 19 nt, Artificial Sequence
  Synthetic
ccaaauaaucuuccaggua

SEQ ID NO: 12817 - RNA, 19 nt, Artificial Sequence
  Synthetic
acaaagaagucauggauug

SEQ ID NO: 12818 - RNA, 19 nt, Artificial Sequence
  Synthetic
ccagaugcuuugugguauu

SEQ ID NO: 12819 - RNA, 19 nt, Artificial Sequence
  Synthetic
ugaagaauggaaagagcua

SEQ ID NO: 12820 - RNA, 19 nt, Artificial Sequence
  Synthetic
cagcacagaugcagcagua

SEQ ID NO: 12821 - RNA, 19 nt, Artificial Sequence
  Synthetic
gguaugggcuacaaagaga

SEQ ID NO: 12822 - RNA, 19 nt, Artificial Sequence
  Synthetic
aagcaagaaugguguugua

SEQ ID NO: 12823 - RNA, 19 nt, Artificial Sequence
  Synthetic
gauaaaaugaggcagaaua

SEQ ID NO: 12824 - RNA, 19 nt, Artificial Sequence
  Synthetic
agaacaugcaauugaagaa

SEQ ID NO: 12825 - RNA, 19 nt, Artificial Sequence
  Synthetic
ggagcuggaucaugaaaga

SEQ ID NO: 12826 - RNA, 19 nt, Artificial Sequence
  Synthetic
gauuugaagccuagcaaca

SEQ ID NO: 12827 - RNA, 19 nt, Artificial Sequence
  Synthetic
cagccaacugugaggaauu

SEQ ID NO: 12828 - RNA, 19 nt, Artificial Sequence
  Synthetic
gaaccaaacucaugcaaag

SEQ ID NO: 12829 - RNA, 19 nt, Artificial Sequence
  Synthetic
aagaauggaaagagcuaau

SEQ ID NO: 12830 - RNA, 19 nt, Artificial Sequence
  Synthetic
cauagagauuugaagccua

SEQ ID NO: 12831 - RNA, 19 nt, Artificial Sequence
  Synthetic
agucauggauugggaagaa

SEQ ID NO: 12832 - RNA, 19 nt, Artificial Sequence
  Synthetic
ccgaaaucaugaagagcau

SEQ ID NO: 12833 - RNA, 19 nt, Artificial Sequence
  Synthetic
acgagcagaucaagauaaa

SEQ ID NO: 12834 - RNA, 19 nt, Artificial Sequence
  Synthetic
gaacagcagcagugccaua

SEQ ID NO: 12835 - RNA, 19 nt, Artificial Sequence
  Synthetic
ccacaaugcgcguugacua

SEQ ID NO: 12836 - RNA, 19 nt, Artificial Sequence
  Synthetic
acaagaggacccaggagaa

SEQ ID NO: 12837 - RNA, 19 nt, Artificial Sequence
  Synthetic
uaucagaggaagugaagau

SEQ ID NO: 12838 - RNA, 19 nt, Artificial Sequence
  Synthetic
cagaaguaucagaggaagu

SEQ ID NO: 12839 - RNA, 19 nt, Artificial Sequence
  Synthetic
ggucagaaguaucagagga

SEQ ID NO: 12840 - RNA, 19 nt, Artificial Sequence
  Synthetic
caauaacucucuacaggaa

SEQ ID NO: 12841 - RNA, 19 nt, Artificial Sequence
  Synthetic
gaccaggcauucacagaaa

SEQ ID NO: 12842 - RNA, 19 nt, Artificial Sequence
  Synthetic
gucagaaguaucagaggaa

SEQ ID NO: 12843 - RNA, 19 nt, Artificial Sequence
  Synthetic
caagaggacccaggagaaa

SEQ ID NO: 12844 - RNA, 19 nt, Artificial Sequence
  Synthetic
ggagaacucuuuagccgaa

SEQ ID NO: 12845 - RNA, 19 nt, Artificial Sequence
  Synthetic
cgaaugggccaguaugaau

SEQ ID NO: 12846 - RNA, 19 nt, Artificial Sequence
  Synthetic
gaaagagaagcauccgaaa

SEQ ID NO: 12847 - RNA, 19 nt, Artificial Sequence
  Synthetic
aggcauucacagaaagaga

SEQ ID NO: 12848 - RNA, 19 nt, Artificial Sequence
  Synthetic
cugaagaggcggaagaaag

SEQ ID NO: 12849 - RNA, 19 nt, Artificial Sequence
  Synthetic
ggaucaugcaaucaacaaa

SEQ ID NO: 12850 - RNA, 19 nt, Artificial Sequence
  Synthetic
auaacucucuacaggaaua

SEQ ID NO: 12851 - RNA, 19 nt, Artificial Sequence
  Synthetic
ccugaaacucacugacuuu

SEQ ID NO: 12852 - RNA, 19 nt, Artificial Sequence
  Synthetic
gcugaagaggcggaagaaa

SEQ ID NO: 12853 - RNA, 19 nt, Artificial Sequence
  Synthetic
cugcugaagaggcggaaga

SEQ ID NO: 12854 - RNA, 19 nt, Artificial Sequence
  Synthetic
gccugcagaucaagaagaa

SEQ ID NO: 12855 - RNA, 19 nt, Artificial Sequence
  Synthetic
caacaaaggucccucaaac

SEQ ID NO: 12856 - RNA, 19 nt, Artificial Sequence
  Synthetic
ccagaauggucagaaguau

SEQ ID NO: 12857 - RNA, 19 nt, Artificial Sequence
  Synthetic
caacauugcccaucgggau

SEQ ID NO: 12858 - RNA, 19 nt, Artificial Sequence
  Synthetic
gagcccacccagagaauga

SEQ ID NO: 12859 - RNA, 19 nt, Artificial Sequence
  Synthetic
ugaagaugcucauucggaa

SEQ ID NO: 12860 - RNA, 19 nt, Artificial Sequence
  Synthetic
ucaccgaguuuaugaacca

SEQ ID NO: 12861 - RNA, 19 nt, Artificial Sequence
  Synthetic
gagagaagcugcagagaua

SEQ ID NO: 12862 - RNA, 19 nt, Artificial Sequence
  Synthetic
ggacaacacugcuggguuu

SEQ ID NO: 12863 - RNA, 19 nt, Artificial Sequence
  Synthetic
gcaaagugcuggagugcuu

SEQ ID NO: 12864 - RNA, 19 nt, Artificial Sequence
  Synthetic
agaaagacgcagugcuuaa

SEQ ID NO: 12865 - RNA, 19 nt, Artificial Sequence
  Synthetic
gcagagauaaugcgggaua

SEQ ID NO: 12866 - RNA, 19 nt, Artificial Sequence
  Synthetic
ggagaaagacgcagugcuu

SEQ ID NO: 12867 - RNA, 19 nt, Artificial Sequence
  Synthetic
gggacgaagucaaggagga

SEQ ID NO: 12868 - RNA, 19 nt, Artificial Sequence
  Synthetic
cuacacaucuaaggagaaa

SEQ ID NO: 12869 - RNA, 19 nt, Artificial Sequence
  Synthetic
gggaugaagaggaggauuc

SEQ ID NO: 12870 - RNA, 19 nt, Artificial Sequence
  Synthetic
uugguauacuugugugaaa

SEQ ID NO: 12871 - RNA, 19 nt, Artificial Sequence
  Synthetic
gagaagcugcagagauaau

SEQ ID NO: 12872 - RNA, 19 nt, Artificial Sequence
  Synthetic
cccuagaccaugucagaua

SEQ ID NO: 12873 - RNA, 19 nt, Artificial Sequence
  Synthetic
ccacuaugcggguagacua

SEQ ID NO: 12874 - RNA, 19 nt, Artificial Sequence
  Synthetic
gcuaaggagaccacccaaa

SEQ ID NO: 12875 - RNA, 19 nt, Artificial Sequence
  Synthetic
gugaaacagcagaggagca

SEQ ID NO: 12876 - RNA, 19 nt, Artificial Sequence
  Synthetic
cugcagagauaaugcggga

SEQ ID NO: 12877 - RNA, 19 nt, Artificial Sequence
  Synthetic
ggggcuaucuuuugguaua

SEQ ID NO: 12878 - RNA, 19 nt, Artificial Sequence
  Synthetic
cauggaagguggugaguug

SEQ ID NO: 12879 - RNA, 19 nt, Artificial Sequence
  Synthetic
acgcagugaccgacgacua

SEQ ID NO: 12880 - RNA, 19 nt, Artificial Sequence
  Synthetic
acgaccaggugaagaucaa

SEQ ID NO: 12881 - RNA, 19 nt, Artificial Sequence
  Synthetic
gcuaaguggcuucccauua

SEQ ID NO: 12882 - RNA, 19 nt, Artificial Sequence
  Synthetic
ccacagagaggcugaccau

SEQ ID NO: 12883 - RNA, 19 nt, Artificial Sequence
  Synthetic
gagugcugcaggaggacaa

SEQ ID NO: 12884 - RNA, 19 nt, Artificial Sequence
  Synthetic
aggcuuucacugagagaga

SEQ ID NO: 12885 - RNA, 19 nt, Artificial Sequence
  Synthetic
cugcauaacagacugaaau

SEQ ID NO: 12886 - RNA, 19 nt, Artificial Sequence
  Synthetic
ggagcugccugcugccaua

SEQ ID NO: 12887 - RNA, 19 nt, Artificial Sequence
  Synthetic
gcaacaaccaguagcucau

SEQ ID NO: 12888 - RNA, 19 nt, Artificial Sequence
  Synthetic
acagagaggcugaccauca

SEQ ID NO: 12889 - RNA, 19 nt, Artificial Sequence
  Synthetic
gugcuuaagcucaccgauu

SEQ ID NO: 12890 - RNA, 19 nt, Artificial Sequence
  Synthetic
guccagagaaguaugacaa

SEQ ID NO: 12891 - RNA, 19 nt, Artificial Sequence
  Synthetic
ccaaagauguugugaggaa

SEQ ID NO: 12892 - RNA, 19 nt, Artificial Sequence
  Synthetic
gcucaguucuagagacaua

SEQ ID NO: 12893 - RNA, 19 nt, Artificial Sequence
  Synthetic
ggacaaagccaucaaggaa

SEQ ID NO: 12894 - RNA, 19 nt, Artificial Sequence
  Synthetic
agagaaugaagaugagaaa

SEQ ID NO: 12895 - RNA, 19 nt, Artificial Sequence
  Synthetic
ccaccgaggcccuggauaa

SEQ ID NO: 12896 - RNA, 19 nt, Artificial Sequence
  Synthetic
ggagaaaucuggcaucaua

SEQ ID NO: 12897 - RNA, 19 nt, Artificial Sequence
  Synthetic
ggucguggauucacagaua

SEQ ID NO: 12898 - RNA, 19 nt, Artificial Sequence
  Synthetic
uggcagaaauugugaagca

SEQ ID NO: 12899 - RNA, 19 nt, Artificial Sequence
  Synthetic
gaaucaaggacucuggaaa

SEQ ID NO: 12900 - RNA, 19 nt, Artificial Sequence
  Synthetic
gaggaagaguggagucaga

SEQ ID NO: 12901 - RNA, 19 nt, Artificial Sequence
  Synthetic
ccaaaggauaugcgaagaa

SEQ ID NO: 12902 - RNA, 19 nt, Artificial Sequence
  Synthetic
agauaaaguagaucgacua

SEQ ID NO: 12903 - RNA, 19 nt, Artificial Sequence
  Synthetic
ggaauuagugguccaguua

SEQ ID NO: 12904 - RNA, 19 nt, Artificial Sequence
  Synthetic
gagagaaugaagaugagaa

SEQ ID NO: 12905 - RNA, 19 nt, Artificial Sequence
  Synthetic
agaaugaagaugagaaacu

SEQ ID NO: 12906 - RNA, 19 nt, Artificial Sequence
  Synthetic
aggcagugguugcaggaau

SEQ ID NO: 12907 - RNA, 19 nt, Artificial Sequence
  Synthetic
gauuuagggugcaggacuu

SEQ ID NO: 12908 - RNA, 19 nt, Artificial Sequence
  Synthetic
gacaaagccaucaaggaaa

SEQ ID NO: 12909 - RNA, 19 nt, Artificial Sequence
  Synthetic
gauuaaagcugcuguauag

SEQ ID NO: 12910 - RNA, 19 nt, Artificial Sequence
  Synthetic
caggaggcuuggaaguaua

SEQ ID NO: 12911 - RNA, 19 nt, Artificial Sequence
  Synthetic
cgaccuuucugauuaguaa

SEQ ID NO: 12912 - RNA, 19 nt, Artificial Sequence
  Synthetic
cagauaaaguagaucgacu

SEQ ID NO: 12913 - RNA, 19 nt, Artificial Sequence
  Synthetic
gcaggugauagaagagcaa

SEQ ID NO: 12914 - RNA, 19 nt, Artificial Sequence
  Synthetic
ugauuaaagcugcuguaua

SEQ ID NO: 12915 - RNA, 19 nt, Artificial Sequence
  Synthetic
aaggauaugcgaagaaaga

SEQ ID NO: 12916 - RNA, 19 nt, Artificial Sequence
  Synthetic
guaaaggagagaaugaaga

SEQ ID NO: 12917 - RNA, 19 nt, Artificial Sequence
  Synthetic
ccaguuagagucuguguaa

SEQ ID NO: 12918 - RNA, 19 nt, Artificial Sequence
  Synthetic
ugagaaacugaaugaagua

SEQ ID NO: 12919 - RNA, 19 nt, Artificial Sequence
  Synthetic
gauaaaguagaucgacuaa

SEQ ID NO: 12920 - RNA, 19 nt, Artificial Sequence
  Synthetic
ggaagcuccugaaggucaa

SEQ ID NO: 12921 - RNA, 19 nt, Artificial Sequence
  Synthetic
gagacaaggaagaggguaa

SEQ ID NO: 12922 - RNA, 19 nt, Artificial Sequence
  Synthetic
aggaagaacuaaagccaua

SEQ ID NO: 12923 - RNA, 19 nt, Artificial Sequence
  Synthetic
aaacaauagggaagggaaa

SEQ ID NO: 12924 - RNA, 19 nt, Artificial Sequence
  Synthetic
uggaagaaugaaagagaaa

SEQ ID NO: 12925 - RNA, 19 nt, Artificial Sequence
  Synthetic
ggaaauuaccguuuacaaa

SEQ ID NO: 12926 - RNA, 19 nt, Artificial Sequence
  Synthetic
ggaacaaauuggacacauu

SEQ ID NO: 12927 - RNA, 19 nt, Artificial Sequence
  Synthetic
gaagaaugaaagagaaaga

SEQ ID NO: 12928 - RNA, 19 nt, Artificial Sequence
  Synthetic
gggaagauacauacauaua

SEQ ID NO: 12929 - RNA, 19 nt, Artificial Sequence
  Synthetic
cagaaagaggagugggaca

SEQ ID NO: 12930 - RNA, 19 nt, Artificial Sequence
  Synthetic
acaaagauguggcucgaaa

SEQ ID NO: 12931 - RNA, 19 nt, Artificial Sequence
  Synthetic
uguggaaagugaacagaaa

SEQ ID NO: 12932 - RNA, 19 nt, Artificial Sequence
  Synthetic
ccaaaagaccucaggcuaa

SEQ ID NO: 12933 - RNA, 19 nt, Artificial Sequence
  Synthetic
aagaaagagacaaggaaga

SEQ ID NO: 12934 - RNA, 19 nt, Artificial Sequence
  Synthetic
gaaaaguguuagaugcaaa

SEQ ID NO: 12935 - RNA, 19 nt, Artificial Sequence
  Synthetic
gaaagaggcccgugcaaaa

SEQ ID NO: 12936 - RNA, 19 nt, Artificial Sequence
  Synthetic
gggcuuugcacgagaugaa

SEQ ID NO: 12937 - RNA, 19 nt, Artificial Sequence
  Synthetic
augaagaggaagaacuaaa

SEQ ID NO: 12938 - RNA, 19 nt, Artificial Sequence
  Synthetic
caaaugagcuuaugcugua

SEQ ID NO: 12939 - RNA, 19 nt, Artificial Sequence
  Synthetic
ccaugaaacgggugcauuu

SEQ ID NO: 12940 - RNA, 19 nt, Artificial Sequence
  Synthetic
cuaaugacaugaugagaga

SEQ ID NO: 12941 - RNA, 19 nt, Artificial Sequence
  Synthetic
ggaaaagacagcagccuua

SEQ ID NO: 12942 - RNA, 19 nt, Artificial Sequence
  Synthetic
agaaagaggagugggacaa

SEQ ID NO: 12943 - RNA, 19 nt, Artificial Sequence
  Synthetic
cugaagguccagagaagua

SEQ ID NO: 12944 - RNA, 19 nt, Artificial Sequence
  Synthetic
aaugacaugaugagagaaa

SEQ ID NO: 12945 - RNA, 19 nt, Artificial Sequence
  Synthetic
ggaagaggguaaagauucu

SEQ ID NO: 12946 - RNA, 19 nt, Artificial Sequence
  Synthetic
uagagagguugcugugaaa

SEQ ID NO: 12947 - RNA, 19 nt, Artificial Sequence
  Synthetic
cagggaagauacauacaua

SEQ ID NO: 12948 - RNA, 19 nt, Artificial Sequence
  Synthetic
guagagagguugcugugaa

SEQ ID NO: 12949 - RNA, 19 nt, Artificial Sequence
  Synthetic
uggaaagugaacagaaaga

SEQ ID NO: 12950 - RNA, 19 nt, Artificial Sequence
  Synthetic
ucaugaagaggaagaacua

SEQ ID NO: 12951 - RNA, 19 nt, Artificial Sequence
  Synthetic
gcggagagguauuugauua

SEQ ID NO: 12952 - RNA, 19 nt, Artificial Sequence
  Synthetic
ggaaagagguagcugugaa

SEQ ID NO: 12953 - RNA, 19 nt, Artificial Sequence
  Synthetic
gaaugaaccugaaagcaaa

SEQ ID NO: 12954 - RNA, 19 nt, Artificial Sequence
  Synthetic
ucacgaagaugaugaacua

SEQ ID NO: 12955 - RNA, 19 nt, Artificial Sequence
  Synthetic
caucaagauugcagacuuu

SEQ ID NO: 12956 - RNA, 19 nt, Artificial Sequence
  Synthetic
ggaacaagcuggacaccuu

SEQ ID NO: 12957 - RNA, 19 nt, Artificial Sequence
  Synthetic
ugaaugaaccugaaagcaa

SEQ ID NO: 12958 - RNA, 19 nt, Artificial Sequence
  Synthetic
gggagauggaggugugcaa

SEQ ID NO: 12959 - RNA, 19 nt, Artificial Sequence
  Synthetic
gagaggcacuuuagagcaa

SEQ ID NO: 12960 - RNA, 19 nt, Artificial Sequence
  Synthetic
gggaagagauccaggacuc

SEQ ID NO: 12961 - RNA, 19 nt, Artificial Sequence
  Synthetic
acgaagaugaugaacuaaa

SEQ ID NO: 12962 - RNA, 19 nt, Artificial Sequence
  Synthetic
cgcuaguggcggagaggua

SEQ ID NO: 12963 - RNA, 19 nt, Artificial Sequence
  Synthetic
augaugaacuaaagccuua

SEQ ID NO: 12964 - RNA, 19 nt, Artificial Sequence
  Synthetic
guaacaacgcagaaaauaa

SEQ ID NO: 12965 - RNA, 19 nt, Artificial Sequence
  Synthetic
cagaacucuuccagggcaa

SEQ ID NO: 12966 - RNA, 19 nt, Artificial Sequence
  Synthetic
agugauugagacugagaaa

SEQ ID NO: 12967 - RNA, 19 nt, Artificial Sequence
  Synthetic
gcaaggugcuggacgcgaa

SEQ ID NO: 12968 - RNA, 19 nt, Artificial Sequence
  Synthetic
gaaacuauuccgcgaagua

SEQ ID NO: 12969 - RNA, 19 nt, Artificial Sequence
  Synthetic
gagcaaaucaugaaagauc

SEQ ID NO: 12970 - RNA, 19 nt, Artificial Sequence
  Synthetic
cugugaagaucauugacaa

SEQ ID NO: 12971 - RNA, 19 nt, Artificial Sequence
  Synthetic
caugaaagaucgauggaug

SEQ ID NO: 12972 - RNA, 19 nt, Artificial Sequence
  Synthetic
ccauagagacuuaaaggca

SEQ ID NO: 12973 - RNA, 19 nt, Artificial Sequence
  Synthetic
agaccauuggcaaggguaa

SEQ ID NO: 12974 - RNA, 19 nt, Artificial Sequence
  Synthetic
ucgccuaaaccaagaaauu

SEQ ID NO: 12975 - RNA, 19 nt, Artificial Sequence
  Synthetic
gugaaaaccugcuuaagaa

SEQ ID NO: 12976 - RNA, 19 nt, Artificial Sequence
  Synthetic
acaaaucgaagcaggaauu

SEQ ID NO: 12977 - RNA, 19 nt, Artificial Sequence
  Synthetic
cauggcaggaugaaagaaa

SEQ ID NO: 12978 - RNA, 19 nt, Artificial Sequence
  Synthetic
uugaagugauugagacuga

SEQ ID NO: 12979 - RNA, 19 nt, Artificial Sequence
  Synthetic
gcgagcugcaugagaagua

SEQ ID NO: 12980 - RNA, 19 nt, Artificial Sequence
  Synthetic
gcggaaagccagcagcaca

SEQ ID NO: 12981 - RNA, 19 nt, Artificial Sequence
  Synthetic
gagaguauuaagagggaaa

SEQ ID NO: 12982 - RNA, 19 nt, Artificial Sequence
  Synthetic
gcagagagguugcaauaaa

SEQ ID NO: 12983 - RNA, 19 nt, Artificial Sequence
  Synthetic
gggaaauggaagugugcaa

SEQ ID NO: 12984 - RNA, 19 nt, Artificial Sequence
  Synthetic
ccucaaagaagauggaauu

SEQ ID NO: 12985 - RNA, 19 nt, Artificial Sequence
  Synthetic
gaacugagagagagaguau

SEQ ID NO: 12986 - RNA, 19 nt, Artificial Sequence
  Synthetic
gagcaaaucaugaaggaca

SEQ ID NO: 12987 - RNA, 19 nt, Artificial Sequence
  Synthetic
cuaaaggaacugagagaga

SEQ ID NO: 12988 - RNA, 19 nt, Artificial Sequence
  Synthetic
aggcagagagguugcaaua

SEQ ID NO: 12989 - RNA, 19 nt, Artificial Sequence
  Synthetic
ggaaugacacgacgaaaua

SEQ ID NO: 12990 - RNA, 19 nt, Artificial Sequence
  Synthetic
gaacauugcuugugugugu

SEQ ID NO: 12991 - RNA, 19 nt, Artificial Sequence
  Synthetic
cugaaugacugcuaagaau

SEQ ID NO: 12992 - RNA, 19 nt, Artificial Sequence
  Synthetic
gggagggaguggagaagga

SEQ ID NO: 12993 - RNA, 19 nt, Artificial Sequence
  Synthetic
ugaagaagaugaacucaaa

SEQ ID NO: 12994 - RNA, 19 nt, Artificial Sequence
  Synthetic
gggauauucacaagaagaa

SEQ ID NO: 12995 - RNA, 19 nt, Artificial Sequence
  Synthetic
ccugaacacugauggaaau

SEQ ID NO: 12996 - RNA, 19 nt, Artificial Sequence
  Synthetic
acugagagagagaguauua

SEQ ID NO: 12997 - RNA, 19 nt, Artificial Sequence
  Synthetic
ccuuacaggcagagagguu

SEQ ID NO: 12998 - RNA, 19 nt, Artificial Sequence
  Synthetic
uggaaugacacgacgaaau

SEQ ID NO: 12999 - RNA, 19 nt, Artificial Sequence
  Synthetic
gaggugaaguauuugacua

SEQ ID NO: 13000 - RNA, 19 nt, Artificial Sequence
  Synthetic
uagauauuauggugggaau

SEQ ID NO: 13001 - RNA, 19 nt, Artificial Sequence
  Synthetic
gggaauugcuccagccagu

SEQ ID NO: 13002 - RNA, 19 nt, Artificial Sequence
  Synthetic
gaacacugauggaaaugua

SEQ ID NO: 13003 - RNA, 19 nt, Artificial Sequence
  Synthetic
gaaugacugcuaagaauua

SEQ ID NO: 13004 - RNA, 19 nt, Artificial Sequence
  Synthetic
ggugcuaaauccaauuaaa

SEQ ID NO: 13005 - RNA, 19 nt, Artificial Sequence
  Synthetic
gcuguaacccagugauuau

SEQ ID NO: 13006 - RNA, 19 nt, Artificial Sequence
  Synthetic
gagaugggcacgcggagaa

SEQ ID NO: 13007 - RNA, 19 nt, Artificial Sequence
  Synthetic
gcuagugauuccaguucua

SEQ ID NO: 13008 - RNA, 19 nt, Artificial Sequence
  Synthetic
cgaugaaaucacagcuaca

SEQ ID NO: 13009 - RNA, 19 nt, Artificial Sequence
  Synthetic
accuaaaggaacugagaga

SEQ ID NO: 13010 - RNA, 19 nt, Artificial Sequence
  Synthetic
augaagaagaugaacucaa

SEQ ID NO: 13011 - RNA, 19 nt, Artificial Sequence
  Synthetic
gcaaaugaguuaaagaaga

SEQ ID NO: 13012 - RNA, 19 nt, Artificial Sequence
  Synthetic
cagacgaaccugagagaau

SEQ ID NO: 13013 - RNA, 19 nt, Artificial Sequence
  Synthetic
gagcaaaucaugaaagaca

SEQ ID NO: 13014 - RNA, 19 nt, Artificial Sequence
  Synthetic
caucaagauuaucgacaaa

SEQ ID NO: 13015 - RNA, 19 nt, Artificial Sequence
  Synthetic
ggagggaaacugaggaaau

SEQ ID NO: 13016 - RNA, 19 nt, Artificial Sequence
  Synthetic
ccuaaagacuggagaaucu

SEQ ID NO: 13017 - RNA, 19 nt, Artificial Sequence
  Synthetic
gugaggaguugaagccaua

SEQ ID NO: 13018 - RNA, 19 nt, Artificial Sequence
  Synthetic
acacagagcccgaggagga

SEQ ID NO: 13019 - RNA, 19 nt, Artificial Sequence
  Synthetic
gcaaaucaugaaagacaaa

SEQ ID NO: 13020 - RNA, 19 nt, Artificial Sequence
  Synthetic
ccaucaagauuaucgacaa

SEQ ID NO: 13021 - RNA, 19 nt, Artificial Sequence
  Synthetic
caucaagauugcugacuuu

SEQ ID NO: 13022 - RNA, 19 nt, Artificial Sequence
  Synthetic
ccaagagaauugaggugau

SEQ ID NO: 13023 - RNA, 19 nt, Artificial Sequence
  Synthetic
cuggagaaguguuugacua

SEQ ID NO: 13024 - RNA, 19 nt, Artificial Sequence
  Synthetic
gcacuauugucaccagaaa

SEQ ID NO: 13025 - RNA, 19 nt, Artificial Sequence
  Synthetic
gcuaugagggugaggaguu

SEQ ID NO: 13026 - RNA, 19 nt, Artificial Sequence
  Synthetic
guacgcaagugcuggagaa

SEQ ID NO: 13027 - RNA, 19 nt, Artificial Sequence
  Synthetic
cugcaaaugaguuaaagaa

SEQ ID NO: 13028 - RNA, 19 nt, Artificial Sequence
  Synthetic
ggucacaaguugccaucua

SEQ ID NO: 13029 - RNA, 19 nt, Artificial Sequence
  Synthetic
ggaccauugggaagggcaa

SEQ ID NO: 13030 - RNA, 19 nt, Artificial Sequence
  Synthetic
gaucgaagcuggacacguu

SEQ ID NO: 13031 - RNA, 19 nt, Artificial Sequence
  Synthetic
ccaccaaccucuucaccaa

SEQ ID NO: 13032 - RNA, 19 nt, Artificial Sequence
  Synthetic
uugccaaaugggaaagaaa

SEQ ID NO: 13033 - RNA, 19 nt, Artificial Sequence
  Synthetic
cagcacagaagaaggauga

SEQ ID NO: 13034 - RNA, 19 nt, Artificial Sequence
  Synthetic
aggcggagcugaaggagga

SEQ ID NO: 13035 - RNA, 19 nt, Artificial Sequence
  Synthetic
cggagcuguuucagggcaa

SEQ ID NO: 13036 - RNA, 19 nt, Artificial Sequence
  Synthetic
gagccuaaagacuggagaa

SEQ ID NO: 13037 - RNA, 19 nt, Artificial Sequence
  Synthetic
gaaggaagcucgagccaag

SEQ ID NO: 13038 - RNA, 19 nt, Artificial Sequence
  Synthetic
ggugaggaguugaagccau

SEQ ID NO: 13039 - RNA, 19 nt, Artificial Sequence
  Synthetic
gggaagaaaucaaagaguc

SEQ ID NO: 13040 - RNA, 19 nt, Artificial Sequence
  Synthetic
augaaagacaaauggauca

SEQ ID NO: 13041 - RNA, 19 nt, Artificial Sequence
  Synthetic
ggaagaagugagugaggau

SEQ ID NO: 13042 - RNA, 19 nt, Artificial Sequence
  Synthetic
uguaaguuauggagaggaa

SEQ ID NO: 13043 - RNA, 19 nt, Artificial Sequence
  Synthetic
ggccaaagcuggaugagga

SEQ ID NO: 13044 - RNA, 19 nt, Artificial Sequence
  Synthetic
cgaacuuguaugaggguca

SEQ ID NO: 13045 - RNA, 19 nt, Artificial Sequence
  Synthetic
acucggaggaugaggaaga

SEQ ID NO: 13046 - RNA, 19 nt, Artificial Sequence
  Synthetic
acucaaggcuaccggguga

SEQ ID NO: 13047 - RNA, 19 nt, Artificial Sequence
  Synthetic
ccaaagagggacaagggau

SEQ ID NO: 13048 - RNA, 19 nt, Artificial Sequence
  Synthetic
ccaugaagaagaucaacaa

SEQ ID NO: 13049 - RNA, 19 nt, Artificial Sequence
  Synthetic
cagaauacauugcgccuga

SEQ ID NO: 13050 - RNA, 19 nt, Artificial Sequence
  Synthetic
aagagaauuuggagaaacu

SEQ ID NO: 13051 - RNA, 19 nt, Artificial Sequence
  Synthetic
cgucuauacuuugcggaaa

SEQ ID NO: 13052 - RNA, 19 nt, Artificial Sequence
  Synthetic
aguuggagucagaggauga

SEQ ID NO: 13053 - RNA, 19 nt, Artificial Sequence
  Synthetic
augaggaagaagugaguga

SEQ ID NO: 13054 - RNA, 19 nt, Artificial Sequence
  Synthetic
cuacgaacuucaagagaau

SEQ ID NO: 13055 - RNA, 19 nt, Artificial Sequence
  Synthetic
ccauuaagcucaucagcaa

SEQ ID NO: 13056 - RNA, 19 nt, Artificial Sequence
  Synthetic
caaagagggacaagggauu

SEQ ID NO: 13057 - RNA, 19 nt, Artificial Sequence
  Synthetic
ggagaaacuuuuacaagau

SEQ ID NO: 13058 - RNA, 19 nt, Artificial Sequence
  Synthetic
gagcguaccagaugaggaa

SEQ ID NO: 13059 - RNA, 19 nt, Artificial Sequence
  Synthetic
ucaagagaauuuggagaaa

SEQ ID NO: 13060 - RNA, 19 nt, Artificial Sequence
  Synthetic
gggaauuccuggacaagca

SEQ ID NO: 13061 - RNA, 19 nt, Artificial Sequence
  Synthetic
uagccaaccuccaggauuu

SEQ ID NO: 13062 - RNA, 19 nt, Artificial Sequence
  Synthetic
ucaggaugauuguaaguua

SEQ ID NO: 13063 - RNA, 19 nt, Artificial Sequence
  Synthetic
ccacucugcugaagaauau

SEQ ID NO: 13064 - RNA, 19 nt, Artificial Sequence
  Synthetic
acucugaacuaaagaagga

SEQ ID NO: 13065 - RNA, 19 nt, Artificial Sequence
  Synthetic
cggcaaggaugggcaagaa

SEQ ID NO: 13066 - RNA, 19 nt, Artificial Sequence
  Synthetic
ucuacgaacuucaagagaa

SEQ ID NO: 13067 - RNA, 19 nt, Artificial Sequence
  Synthetic
uggaaugccuggaguuuga

SEQ ID NO: 13068 - RNA, 19 nt, Artificial Sequence
  Synthetic
gauacuagcuauuuugaca

SEQ ID NO: 13069 - RNA, 19 nt, Artificial Sequence
  Synthetic
uaaaggagcaggagagagu

SEQ ID NO: 13070 - RNA, 19 nt, Artificial Sequence
  Synthetic
uaauauaugcuccuggaaa

SEQ ID NO: 13071 - RNA, 19 nt, Artificial Sequence
  Synthetic
cggaggaagccaugcgaaa

SEQ ID NO: 13072 - RNA, 19 nt, Artificial Sequence
  Synthetic
ccaucaaacucauuagcaa

SEQ ID NO: 13073 - RNA, 19 nt, Artificial Sequence
  Synthetic
agaacuugauccugcguaa

SEQ ID NO: 13074 - RNA, 19 nt, Artificial Sequence
  Synthetic
gaagaaucguccacagaga

SEQ ID NO: 13075 - RNA, 19 nt, Artificial Sequence
  Synthetic
uauguauggucauggaaua

SEQ ID NO: 13076 - RNA, 19 nt, Artificial Sequence
  Synthetic
ucaagaagaucaacaaaca

SEQ ID NO: 13077 - RNA, 19 nt, Artificial Sequence
  Synthetic
ccgaggacgacgagaccaa

SEQ ID NO: 13078 - RNA, 19 nt, Artificial Sequence
  Synthetic
gcucagagaaugugcuuga

SEQ ID NO: 13079 - RNA, 19 nt, Artificial Sequence
  Synthetic
cgacgagaccaaugaugaa

SEQ ID NO: 13080 - RNA, 19 nt, Artificial Sequence
  Synthetic
aguuugacccugaggaauu

SEQ ID NO: 13081 - RNA, 19 nt, Artificial Sequence
  Synthetic
gcgccacgcuccugaagaa

SEQ ID NO: 13082 - RNA, 19 nt, Artificial Sequence
  Synthetic
gaaugugcuugaugaggaa

SEQ ID NO: 13083 - RNA, 19 nt, Artificial Sequence
  Synthetic
aggccgagcucguggucau

SEQ ID NO: 13084 - RNA, 19 nt, Artificial Sequence
  Synthetic
ccaucaagaagaucaacaa

SEQ ID NO: 13085 - RNA, 19 nt, Artificial Sequence
  Synthetic
ccugagaaguccagagccu

SEQ ID NO: 13086 - RNA, 19 nt, Artificial Sequence
  Synthetic
ucauguggccagagggaga

SEQ ID NO: 13087 - RNA, 19 nt, Artificial Sequence
  Synthetic
uggaguaccugcauaacua

SEQ ID NO: 13088 - RNA, 19 nt, Artificial Sequence
  Synthetic
ggaguuugacccugaggaa

SEQ ID NO: 13089 - RNA, 19 nt, Artificial Sequence
  Synthetic
ggaccacagcccuggagaa

SEQ ID NO: 13090 - RNA, 19 nt, Artificial Sequence
  Synthetic
ggucauggaauacguggaa

SEQ ID NO: 13091 - RNA, 19 nt, Artificial Sequence
  Synthetic
aagaagaucuccaagcaga

SEQ ID NO: 13092 - RNA, 19 nt, Artificial Sequence
  Synthetic
aggagaagcuggagcggcu

SEQ ID NO: 13093 - RNA, 19 nt, Artificial Sequence
  Synthetic
gggccaaggcauuaagacu

SEQ ID NO: 13094 - RNA, 19 nt, Artificial Sequence
  Synthetic
cagagaaugugcuugauga

SEQ ID NO: 13095 - RNA, 19 nt, Artificial Sequence
  Synthetic
cgguguuggcgcuggagua

SEQ ID NO: 13096 - RNA, 19 nt, Artificial Sequence
  Synthetic
caucaagaagaucaacaaa

SEQ ID NO: 13097 - RNA, 19 nt, Artificial Sequence
  Synthetic
cguccagcuuguccggaaa

SEQ ID NO: 13098 - RNA, 19 nt, Artificial Sequence
  Synthetic
cugaagagcggcaacaaga

SEQ ID NO: 13099 - RNA, 19 nt, Artificial Sequence
  Synthetic
gaagagcggcaacaagaua

SEQ ID NO: 13100 - RNA, 19 nt, Artificial Sequence
  Synthetic
cgagaccaaugaugaagaa

SEQ ID NO: 13101 - RNA, 19 nt, Artificial Sequence
  Synthetic
guguagaguauaagcauaa

SEQ ID NO: 13102 - RNA, 19 nt, Artificial Sequence
  Synthetic
aagagauggcugugaaaua

SEQ ID NO: 13103 - RNA, 19 nt, Artificial Sequence
  Synthetic
cugcuguacaagagaguaa

SEQ ID NO: 13104 - RNA, 19 nt, Artificial Sequence
  Synthetic
ucuacuugguaauggaaua

SEQ ID NO: 13105 - RNA, 19 nt, Artificial Sequence
  Synthetic
ugaagagcaccuugggaaa

SEQ ID NO: 13106 - RNA, 19 nt, Artificial Sequence
  Synthetic
aagaauaguaagagggacu

SEQ ID NO: 13107 - RNA, 19 nt, Artificial Sequence
  Synthetic
guugaaaaguuaugcgcaa

SEQ ID NO: 13108 - RNA, 19 nt, Artificial Sequence
  Synthetic
uguggauucuggugggaua

SEQ ID NO: 13109 - RNA, 19 nt, Artificial Sequence
  Synthetic
aagaaaugcuguugcuuuu

SEQ ID NO: 13110 - RNA, 19 nt, Artificial Sequence
  Synthetic
cuggaaugaaagagcuaaa

SEQ ID NO: 13111 - RNA, 19 nt, Artificial Sequence
  Synthetic
aagcauaacgaaaugacaa

SEQ ID NO: 13112 - RNA, 19 nt, Artificial Sequence
  Synthetic
ccagaugaugaaacagaua

SEQ ID NO: 13113 - RNA, 19 nt, Artificial Sequence
  Synthetic
cugaagagcaccuugggaa

SEQ ID NO: 13114 - RNA, 19 nt, Artificial Sequence
  Synthetic
cggcaaauuguaugcagua

SEQ ID NO: 13115 - RNA, 19 nt, Artificial Sequence
  Synthetic
ggccagaaggugaagaaaa

SEQ ID NO: 13116 - RNA, 19 nt, Artificial Sequence
  Synthetic
cgagagaggaagaggagaa

SEQ ID NO: 13117 - RNA, 19 nt, Artificial Sequence
  Synthetic
cgauaaagacggauucuaa

SEQ ID NO: 13118 - RNA, 19 nt, Artificial Sequence
  Synthetic
uggacaugguggagcauua

SEQ ID NO: 13119 - RNA, 19 nt, Artificial Sequence
  Synthetic
cagaggaccugguggccaa

SEQ ID NO: 13120 - RNA, 19 nt, Artificial Sequence
  Synthetic
ucauggagcacgugagcaa

SEQ ID NO: 13121 - RNA, 19 nt, Artificial Sequence
  Synthetic
uggccaaagccgagcggaa

SEQ ID NO: 13122 - RNA, 19 nt, Artificial Sequence
  Synthetic
gaucggagagggagaguuu

SEQ ID NO: 13123 - RNA, 19 nt, Artificial Sequence
  Synthetic
cgacaucgagagaggaaga

SEQ ID NO: 13124 - RNA, 19 nt, Artificial Sequence
  Synthetic
gagaggaagaggagaaagu

SEQ ID NO: 13125 - RNA, 19 nt, Artificial Sequence
  Synthetic
ugucggaggccguggagaa

SEQ ID NO: 13126 - RNA, 19 nt, Artificial Sequence
  Synthetic
ugaagaauaucaaguguga

SEQ ID NO: 13127 - RNA, 19 nt, Artificial Sequence
  Synthetic
gagcauuacagcaaggaca

SEQ ID NO: 13128 - RNA, 19 nt, Artificial Sequence
  Synthetic
cgaagaugcaacacgagaa

SEQ ID NO: 13129 - RNA, 19 nt, Artificial Sequence
  Synthetic
gagagaggaagaggagaaa

SEQ ID NO: 13130 - RNA, 19 nt, Artificial Sequence
  Synthetic
gagcuguccugcaggguga

SEQ ID NO: 13131 - RNA, 19 nt, Artificial Sequence
  Synthetic
gggcgaggcucucugguuu

SEQ ID NO: 13132 - RNA, 19 nt, Artificial Sequence
  Synthetic
agggcaaccuggugaacuu

SEQ ID NO: 13133 - RNA, 19 nt, Artificial Sequence
  Synthetic
ugguggagcauuacagcaa

SEQ ID NO: 13134 - RNA, 19 nt, Artificial Sequence
  Synthetic
acgagaaccuggugcgucu

SEQ ID NO: 13135 - RNA, 19 nt, Artificial Sequence
  Synthetic
cuaaaaugucacugaaaga

SEQ ID NO: 13136 - RNA, 19 nt, Artificial Sequence
  Synthetic
ggcaaaagguggccgugaa

SEQ ID NO: 13137 - RNA, 19 nt, Artificial Sequence
  Synthetic
gcaaacuggccgagaagcu

SEQ ID NO: 13138 - RNA, 19 nt, Artificial Sequence
  Synthetic
gggaaguucaccagcaagu

SEQ ID NO: 13139 - RNA, 19 nt, Artificial Sequence
  Synthetic
ugacgaagaugcaacacga

SEQ ID NO: 13140 - RNA, 19 nt, Artificial Sequence
  Synthetic
uggccgagggcauggagua

SEQ ID NO: 13141 - RNA, 19 nt, Artificial Sequence
  Synthetic
gggauucggugcagaugga

SEQ ID NO: 13142 - RNA, 19 nt, Artificial Sequence
  Synthetic
ggugagaccaaagcggaaa

SEQ ID NO: 13143 - RNA, 19 nt, Artificial Sequence
  Synthetic
acgggaaguucaccagcaa

SEQ ID NO: 13144 - RNA, 19 nt, Artificial Sequence
  Synthetic
acaugaaacuauugggaca

SEQ ID NO: 13145 - RNA, 19 nt, Artificial Sequence
  Synthetic
gacuaaagcuucacuauaa

SEQ ID NO: 13146 - RNA, 19 nt, Artificial Sequence
  Synthetic
ucacagacaucaagucaaa

SEQ ID NO: 13147 - RNA, 19 nt, Artificial Sequence
  Synthetic
gaggagagcuguuugacua

SEQ ID NO: 13148 - RNA, 19 nt, Artificial Sequence
  Synthetic
aagaagauuaugagaggaa

SEQ ID NO: 13149 - RNA, 19 nt, Artificial Sequence
  Synthetic
cuguaaagaaugaagagua

SEQ ID NO: 13150 - RNA, 19 nt, Artificial Sequence
  Synthetic
ggaaagugacaaugcaauu

SEQ ID NO: 13151 - RNA, 19 nt, Artificial Sequence
  Synthetic
ggcaaacaauggaggauuu

SEQ ID NO: 13152 - RNA, 19 nt, Artificial Sequence
  Synthetic
cagaacaccugcaaauaaa

SEQ ID NO: 13153 - RNA, 19 nt, Artificial Sequence
  Synthetic
ccaguaaauucaacaggaa

SEQ ID NO: 13154 - RNA, 19 nt, Artificial Sequence
  Synthetic
gagcaugggcauacuguua

SEQ ID NO: 13155 - RNA, 19 nt, Artificial Sequence
  Synthetic
agauugaggccuugaagaa

SEQ ID NO: 13156 - RNA, 19 nt, Artificial Sequence
  Synthetic
gagagaugguagcuauaaa

SEQ ID NO: 13157 - RNA, 19 nt, Artificial Sequence
  Synthetic
acagucagauuuugggaaa

SEQ ID NO: 13158 - RNA, 19 nt, Artificial Sequence
  Synthetic
ccagcauaagagagaaaua

SEQ ID NO: 13159 - RNA, 19 nt, Artificial Sequence
  Synthetic
acaaaagauuaguggaaga

SEQ ID NO: 13160 - RNA, 19 nt, Artificial Sequence
  Synthetic
gcaagaggacuaugaaaga

SEQ ID NO: 13161 - RNA, 19 nt, Artificial Sequence
  Synthetic
gccaaagacuccaguuaau

SEQ ID NO: 13162 - RNA, 19 nt, Artificial Sequence
  Synthetic
gaagauuaugagaggaaaa

SEQ ID NO: 13163 - RNA, 19 nt, Artificial Sequence
  Synthetic
cuaucuagcugcaagguau

SEQ ID NO: 13164 - RNA, 19 nt, Artificial Sequence
  Synthetic
gagccaaagacuccaguua

SEQ ID NO: 13165 - RNA, 19 nt, Artificial Sequence
  Synthetic
gguggaaucuaaaucauua

SEQ ID NO: 13166 - RNA, 19 nt, Artificial Sequence
  Synthetic
ugucaaacacagucagauu

SEQ ID NO: 13167 - RNA, 19 nt, Artificial Sequence
  Synthetic
cacagaaacaacaggcaaa

SEQ ID NO: 13168 - RNA, 19 nt, Artificial Sequence
  Synthetic
guuaauaagaaccagcaua

SEQ ID NO: 13169 - RNA, 19 nt, Artificial Sequence
  Synthetic
gcagguggacccaaagaaa

SEQ ID NO: 13170 - RNA, 19 nt, Artificial Sequence
  Synthetic
ccaaggguaacaaggauua

SEQ ID NO: 13171 - RNA, 19 nt, Artificial Sequence
  Synthetic
aaccagugccugaaagaaa

SEQ ID NO: 13172 - RNA, 19 nt, Artificial Sequence
  Synthetic
ugaguuaauacaaggcaaa

SEQ ID NO: 13173 - RNA, 19 nt, Artificial Sequence
  Synthetic
uguaaagaaugaagaguac

SEQ ID NO: 13174 - RNA, 19 nt, Artificial Sequence
  Synthetic
gggaagaagccaagccuua

SEQ ID NO: 13175 - RNA, 19 nt, Artificial Sequence
  Synthetic
cugaaugaaucuagugaua

SEQ ID NO: 13176 - RNA, 19 nt, Artificial Sequence
  Synthetic
ggaaagaugggaaggaauu

SEQ ID NO: 13177 - RNA, 19 nt, Artificial Sequence
  Synthetic
ggucuguaauggaaggaaa

SEQ ID NO: 13178 - RNA, 19 nt, Artificial Sequence
  Synthetic
ugaugaaguuacagcaaua

SEQ ID NO: 13179 - RNA, 19 nt, Artificial Sequence
  Synthetic
ggaugaacuguaugaaaua

SEQ ID NO: 13180 - RNA, 19 nt, Artificial Sequence
  Synthetic
ggagagacuuguuaggaau

SEQ ID NO: 13181 - RNA, 19 nt, Artificial Sequence
  Synthetic
gggagagacuuguuaggaa

SEQ ID NO: 13182 - RNA, 19 nt, Artificial Sequence
  Synthetic
auggagaacuggugggcua

SEQ ID NO: 13183 - RNA, 19 nt, Artificial Sequence
  Synthetic
gcaugaaugucaccagaaa

SEQ ID NO: 13184 - RNA, 19 nt, Artificial Sequence
  Synthetic
cagcaaaccucaugaagga

SEQ ID NO: 13185 - RNA, 19 nt, Artificial Sequence
  Synthetic
acacacaguuggacacaua

SEQ ID NO: 13186 - RNA, 19 nt, Artificial Sequence
  Synthetic
acuagaagauguugugauu

SEQ ID NO: 13187 - RNA, 19 nt, Artificial Sequence
  Synthetic
ggaggaaguuggccagaau

SEQ ID NO: 13188 - RNA, 19 nt, Artificial Sequence
  Synthetic
gaauggaguaucugagcaa

SEQ ID NO: 13189 - RNA, 19 nt, Artificial Sequence
  Synthetic
gaugaauguuguuaaggaa

SEQ ID NO: 13190 - RNA, 19 nt, Artificial Sequence
  Synthetic
uagaagauguugugauuga

SEQ ID NO: 13191 - RNA, 19 nt, Artificial Sequence
  Synthetic
uggaugaacuguaugaaau

SEQ ID NO: 13192 - RNA, 19 nt, Artificial Sequence
  Synthetic
gugaggaacuacaaaauaa

SEQ ID NO: 13193 - RNA, 19 nt, Artificial Sequence
  Synthetic
uggaaagaugggaaggaau

SEQ ID NO: 13194 - RNA, 19 nt, Artificial Sequence
  Synthetic
agacaggaccaaagcauau

SEQ ID NO: 13195 - RNA, 19 nt, Artificial Sequence
  Synthetic
guacagaguugaaguuguu

SEQ ID NO: 13196 - RNA, 19 nt, Artificial Sequence
  Synthetic
uuacauagcuugggaguca

SEQ ID NO: 13197 - RNA, 19 nt, Artificial Sequence
  Synthetic
cagaaguucaugacagcaa

SEQ ID NO: 13198 - RNA, 19 nt, Artificial Sequence
  Synthetic
ggcgugaccaugugggaaa

SEQ ID NO: 13199 - RNA, 19 nt, Artificial Sequence
  Synthetic
aaagaguccaggagacaaa

SEQ ID NO: 13200 - RNA, 19 nt, Artificial Sequence
  Synthetic
aggcaagggaagaagccaa

SEQ ID NO: 13201 - RNA, 19 nt, Artificial Sequence
  Synthetic
guggcagagugcagggauu

SEQ ID NO: 13202 - RNA, 19 nt, Artificial Sequence
  Synthetic
gaucaacaucaaagcaauu

SEQ ID NO: 13203 - RNA, 19 nt, Artificial Sequence
  Synthetic
guggugaauuauauagcaa

SEQ ID NO: 13204 - RNA, 19 nt, Artificial Sequence
  Synthetic
ggacaaugauggcaagaaa

SEQ ID NO: 13205 - RNA, 19 nt, Artificial Sequence
  Synthetic
aguuaaaggugaaguguua

SEQ ID NO: 13206 - RNA, 19 nt, Artificial Sequence
  Synthetic
gaacagaaucacugacaua

SEQ ID NO: 13207 - RNA, 19 nt, Artificial Sequence
  Synthetic
ggaaauaagagcugugaga

SEQ ID NO: 13208 - RNA, 19 nt, Artificial Sequence
  Synthetic
gugagaaggcuaaaggaaa

SEQ ID NO: 13209 - RNA, 19 nt, Artificial Sequence
  Synthetic
cguaaacaccuuugauaua

SEQ ID NO: 13210 - RNA, 19 nt, Artificial Sequence
  Synthetic
caaagaaggaaguguuuaa

SEQ ID NO: 13211 - RNA, 19 nt, Artificial Sequence
  Synthetic
gcacaaagcaagccagauu

SEQ ID NO: 13212 - RNA, 19 nt, Artificial Sequence
  Synthetic
aaauaagagcugugagaau

SEQ ID NO: 13213 - RNA, 19 nt, Artificial Sequence
  Synthetic
ccagagacauguaugauaa

SEQ ID NO: 13214 - RNA, 19 nt, Artificial Sequence
  Synthetic
guaaagaggcacuagcaaa

SEQ ID NO: 13215 - RNA, 19 nt, Artificial Sequence
  Synthetic
uagcaaaguccgagaugaa

SEQ ID NO: 13216 - RNA, 19 nt, Artificial Sequence
  Synthetic
agucauaggaagagggcau

SEQ ID NO: 13217 - RNA, 19 nt, Artificial Sequence
  Synthetic
agacaagcaucuucaguua

SEQ ID NO: 13218 - RNA, 19 nt, Artificial Sequence
  Synthetic
gagcauacauuaaaccaaa

SEQ ID NO: 13219 - RNA, 19 nt, Artificial Sequence
  Synthetic
ccaaugaccugcugaaauu

SEQ ID NO: 13220 - RNA, 19 nt, Artificial Sequence
  Synthetic
ggaagaagaucacgaagau

SEQ ID NO: 13221 - RNA, 19 nt, Artificial Sequence
  Synthetic
agugagagcacgaugaaua

SEQ ID NO: 13222 - RNA, 19 nt, Artificial Sequence
  Synthetic
gggaagaagaucacgaaga

SEQ ID NO: 13223 - RNA, 19 nt, Artificial Sequence
  Synthetic
ggagguguuuggaaagaua

SEQ ID NO: 13224 - RNA, 19 nt, Artificial Sequence
  Synthetic
gugaaauccuugaacagaa

SEQ ID NO: 13225 - RNA, 19 nt, Artificial Sequence
  Synthetic
caaucauacugcugacaua

SEQ ID NO: 13226 - RNA, 19 nt, Artificial Sequence
  Synthetic
gcauuuugguuguguauau

SEQ ID NO: 13227 - RNA, 19 nt, Artificial Sequence
  Synthetic
ggaaagaaccucucaacau

SEQ ID NO: 13228 - RNA, 19 nt, Artificial Sequence
  Synthetic
ucaacaagaucgucaacaa

SEQ ID NO: 13229 - RNA, 19 nt, Artificial Sequence
  Synthetic
ccagcuugcuagacaaaua

SEQ ID NO: 13230 - RNA, 19 nt, Artificial Sequence
  Synthetic
agaucugggcagugaauua

SEQ ID NO: 13231 - RNA, 19 nt, Artificial Sequence
  Synthetic
aauaagagcugugagaaua

SEQ ID NO: 13232 - RNA, 19 nt, Artificial Sequence
  Synthetic
caaaugaaucuguagacua

SEQ ID NO: 13233 - RNA, 19 nt, Artificial Sequence
  Synthetic
gugcaaagcugccagugaa

SEQ ID NO: 13234 - RNA, 19 nt, Artificial Sequence
  Synthetic
acauaaagcccaagaaauu

SEQ ID NO: 13235 - RNA, 19 nt, Artificial Sequence
  Synthetic
gaaagauguugguggagaa

SEQ ID NO: 13236 - RNA, 19 nt, Artificial Sequence
  Synthetic
uggacaaggucgagauaga

SEQ ID NO: 13237 - RNA, 19 nt, Artificial Sequence
  Synthetic
ggaaaucauucgauccaaa

SEQ ID NO: 13238 - RNA, 19 nt, Artificial Sequence
  Synthetic
agucaguuguguaaagaua

SEQ ID NO: 13239 - RNA, 19 nt, Artificial Sequence
  Synthetic
gggaaagcaugaacgacua

SEQ ID NO: 13240 - RNA, 19 nt, Artificial Sequence
  Synthetic
guacgaugcaauugauaaa

SEQ ID NO: 13241 - RNA, 19 nt, Artificial Sequence
  Synthetic
ccucaaauaugaagaacca

SEQ ID NO: 13242 - RNA, 19 nt, Artificial Sequence
  Synthetic
ccacauaaagcccaagaaa

SEQ ID NO: 13243 - RNA, 19 nt, Artificial Sequence
  Synthetic
caaaguauucagugaggua

SEQ ID NO: 13244 - RNA, 19 nt, Artificial Sequence
  Synthetic
gcuaaaggcuuauccauau

SEQ ID NO: 13245 - RNA, 19 nt, Artificial Sequence
  Synthetic
uggugaaagcuuuggacaa

SEQ ID NO: 13246 - RNA, 19 nt, Artificial Sequence
  Synthetic
ccggaauagugaagacuuu

SEQ ID NO: 13247 - RNA, 19 nt, Artificial Sequence
  Synthetic
gaggugacuuggagaaaga

SEQ ID NO: 13248 - RNA, 19 nt, Artificial Sequence
  Synthetic
cagcagaggaccugauuga

SEQ ID NO: 13249 - RNA, 19 nt, Artificial Sequence
  Synthetic
agguaauugcacagggaau

SEQ ID NO: 13250 - RNA, 19 nt, Artificial Sequence
  Synthetic
cguuaugccagcuaagaaa

SEQ ID NO: 13251 - RNA, 19 nt, Artificial Sequence
  Synthetic
gagcaugguuguuuggaca

SEQ ID NO: 13252 - RNA, 19 nt, Artificial Sequence
  Synthetic
ucugagaugugcugauuua

SEQ ID NO: 13253 - RNA, 19 nt, Artificial Sequence
  Synthetic
aggacaaaguauucaguga

SEQ ID NO: 13254 - RNA, 19 nt, Artificial Sequence
  Synthetic
ccucauucaaacagcaaua

SEQ ID NO: 13255 - RNA, 19 nt, Artificial Sequence
  Synthetic
cagcuaagaaauagauuga

SEQ ID NO: 13256 - RNA, 19 nt, Artificial Sequence
  Synthetic
gcuaauggcuuuaaugagu

SEQ ID NO: 13257 - RNA, 19 nt, Artificial Sequence
  Synthetic
gggaccggcuuuuggcuaa

SEQ ID NO: 13258 - RNA, 19 nt, Artificial Sequence
  Synthetic
ccuuuaaucaucagagaga

SEQ ID NO: 13259 - RNA, 19 nt, Artificial Sequence
  Synthetic
ugacagcaguggaggcaga

SEQ ID NO: 13260 - RNA, 19 nt, Artificial Sequence
  Synthetic
guggauauuucuaggggaa

SEQ ID NO: 13261 - RNA, 19 nt, Artificial Sequence
  Synthetic
cagaugaauuaaugaagga

SEQ ID NO: 13262 - RNA, 19 nt, Artificial Sequence
  Synthetic
cugcuaugcuccagaacuu

SEQ ID NO: 13263 - RNA, 19 nt, Artificial Sequence
  Synthetic
cuuuaauaguucuggcuga

SEQ ID NO: 13264 - RNA, 19 nt, Artificial Sequence
  Synthetic
gcgcucuguuggugaaauu

SEQ ID NO: 13265 - RNA, 19 nt, Artificial Sequence
  Synthetic
acacucuccuucagggaaa

SEQ ID NO: 13266 - RNA, 19 nt, Artificial Sequence
  Synthetic
gcugaugguccaacagauu

SEQ ID NO: 13267 - RNA, 19 nt, Artificial Sequence
  Synthetic
aggaggacgaauaaauuua

SEQ ID NO: 13268 - RNA, 19 nt, Artificial Sequence
  Synthetic
uggaggaggacgaauaaau

SEQ ID NO: 13269 - RNA, 19 nt, Artificial Sequence
  Synthetic
ggaggaggacgaauaaauu

SEQ ID NO: 13270 - RNA, 19 nt, Artificial Sequence
  Synthetic
ggccggaaaccuccagaaa

SEQ ID NO: 13271 - RNA, 19 nt, Artificial Sequence
  Synthetic
gcaaugaaguacaugaaua

SEQ ID NO: 13272 - RNA, 19 nt, Artificial Sequence
  Synthetic
ccaagaagauguacgcaau

SEQ ID NO: 13273 - RNA, 19 nt, Artificial Sequence
  Synthetic
acacugaaguuucugauaa

SEQ ID NO: 13274 - RNA, 19 nt, Artificial Sequence
  Synthetic
gagaaaugucuucaaggaa

SEQ ID NO: 13275 - RNA, 19 nt, Artificial Sequence
  Synthetic
cugguuaauuugugguauu

SEQ ID NO: 13276 - RNA, 19 nt, Artificial Sequence
  Synthetic
gagccaacacuucaagaaa

SEQ ID NO: 13277 - RNA, 19 nt, Artificial Sequence
  Synthetic
ggauaugaagccugacaau

SEQ ID NO: 13278 - RNA, 19 nt, Artificial Sequence
  Synthetic
gagacuagauauccaacua

SEQ ID NO: 13279 - RNA, 19 nt, Artificial Sequence
  Synthetic
ugacggauaucaacaauua

SEQ ID NO: 13280 - RNA, 19 nt, Artificial Sequence
  Synthetic
ucaaggaacuccagaucau

SEQ ID NO: 13281 - RNA, 19 nt, Artificial Sequence
  Synthetic
agauguacgcaaugaagua

SEQ ID NO: 13282 - RNA, 19 nt, Artificial Sequence
  Synthetic
ugggaggaaugaaggaaga

SEQ ID NO: 13283 - RNA, 19 nt, Artificial Sequence
  Synthetic
acgcuuacuucuugucaaa

SEQ ID NO: 13284 - RNA, 19 nt, Artificial Sequence
  Synthetic
gaagaaucgagacuagaua

SEQ ID NO: 13285 - RNA, 19 nt, Artificial Sequence
  Synthetic
cugcagaaccagcgcauca

SEQ ID NO: 13286 - RNA, 19 nt, Artificial Sequence
  Synthetic
uuugcgagccauugggaaa

SEQ ID NO: 13287 - RNA, 19 nt, Artificial Sequence
  Synthetic
cagaagaaugauaccaaga

SEQ ID NO: 13288 - RNA, 19 nt, Artificial Sequence
  Synthetic
agcgcaaugaagugagaaa

SEQ ID NO: 13289 - RNA, 19 nt, Artificial Sequence
  Synthetic
cacugaaguuucugauaau

SEQ ID NO: 13290 - RNA, 19 nt, Artificial Sequence
  Synthetic
gaaaugucuucaaggaacu

SEQ ID NO: 13291 - RNA, 19 nt, Artificial Sequence
  Synthetic
ugagaaaugucuucaagga

SEQ ID NO: 13292 - RNA, 19 nt, Artificial Sequence
  Synthetic
agaaugauaccaagaagau

SEQ ID NO: 13293 - RNA, 19 nt, Artificial Sequence
  Synthetic
uggacuaccugcagaacca

SEQ ID NO: 13294 - RNA, 19 nt, Artificial Sequence
  Synthetic
caccaguguuugaugaaaa

SEQ ID NO: 13295 - RNA, 19 nt, Artificial Sequence
  Synthetic
aagaaugauaccaagaaga

SEQ ID NO: 13296 - RNA, 19 nt, Artificial Sequence
  Synthetic
accaagaagauguacgcaa

SEQ ID NO: 13297 - RNA, 19 nt, Artificial Sequence
  Synthetic
acgcaaugaaguacaugaa

SEQ ID NO: 13298 - RNA, 19 nt, Artificial Sequence
  Synthetic
aggaagaaacagugaagcu

SEQ ID NO: 13299 - RNA, 19 nt, Artificial Sequence
  Synthetic
ggguguuucugcccggaua

SEQ ID NO: 13300 - RNA, 19 nt, Artificial Sequence
  Synthetic
agaaaugucuucaaggaac

SEQ ID NO: 13301 - RNA, 19 nt, Artificial Sequence
  Synthetic
ccuuugagcuggaggagau

SEQ ID NO: 13302 - RNA, 19 nt, Artificial Sequence
  Synthetic
agauguacgccaugaagua

SEQ ID NO: 13303 - RNA, 19 nt, Artificial Sequence
  Synthetic
ugaacaagcagcagugcau

SEQ ID NO: 13304 - RNA, 19 nt, Artificial Sequence
  Synthetic
acaacauucuccuggauga

SEQ ID NO: 13305 - RNA, 19 nt, Artificial Sequence
  Synthetic
ggauggaggcccuaugaca

SEQ ID NO: 13306 - RNA, 19 nt, Artificial Sequence
  Synthetic
ggaugggacaggagucuuu

SEQ ID NO: 13307 - RNA, 19 nt, Artificial Sequence
  Synthetic
ccacgugguccaaggagau

SEQ ID NO: 13308 - RNA, 19 nt, Artificial Sequence
  Synthetic
ccagcaagacuucgugauu

SEQ ID NO: 13309 - RNA, 19 nt, Artificial Sequence
  Synthetic
cagcaagacuucgugauuu

SEQ ID NO: 13310 - RNA, 19 nt, Artificial Sequence
  Synthetic
ucugagaauuacaauguga

SEQ ID NO: 13311 - RNA, 19 nt, Artificial Sequence
  Synthetic
guacauggcuccggagauc

SEQ ID NO: 13312 - RNA, 19 nt, Artificial Sequence
  Synthetic
gagaauuacaaugugagaa

SEQ ID NO: 13313 - RNA, 19 nt, Artificial Sequence
  Synthetic
gaaaccagguguugggaaa

SEQ ID NO: 13314 - RNA, 19 nt, Artificial Sequence
  Synthetic
agacaaagcugaaagauuu

SEQ ID NO: 13315 - RNA, 19 nt, Artificial Sequence
  Synthetic
ucuccaaacuuuagaagaa

SEQ ID NO: 13316 - RNA, 19 nt, Artificial Sequence
  Synthetic
ccugaaaccugauguuaua

SEQ ID NO: 13317 - RNA, 19 nt, Artificial Sequence
  Synthetic
gaucauggcuaaagacaga

SEQ ID NO: 13318 - RNA, 19 nt, Artificial Sequence
  Synthetic
gaauguagcuguaguuuau

SEQ ID NO: 13319 - RNA, 19 nt, Artificial Sequence
  Synthetic
caauaauacgggauacaua

SEQ ID NO: 13320 - RNA, 19 nt, Artificial Sequence
  Synthetic
ggcacaagaucauggcuaa

SEQ ID NO: 13321 - RNA, 19 nt, Artificial Sequence
  Synthetic
ggaaagaguuuaauggaau

SEQ ID NO: 13322 - RNA, 19 nt, Artificial Sequence
  Synthetic
gggaaagaguuuaauggaa

SEQ ID NO: 13323 - RNA, 19 nt, Artificial Sequence
  Synthetic
caaggagguuucugagaua

SEQ ID NO: 13324 - RNA, 19 nt, Artificial Sequence
  Synthetic
cagcggaggaggagaaaga

SEQ ID NO: 13325 - RNA, 19 nt, Artificial Sequence
  Synthetic
agacagaugacgaggagau

SEQ ID NO: 13326 - RNA, 19 nt, Artificial Sequence
  Synthetic
ccagaggccuucagccaua

SEQ ID NO: 13327 - RNA, 19 nt, Artificial Sequence
  Synthetic
ggacccuaguagagaugaa

SEQ ID NO: 13328 - RNA, 19 nt, Artificial Sequence
  Synthetic
ugagauagguagaagucuu

SEQ ID NO: 13329 - RNA, 19 nt, Artificial Sequence
  Synthetic
uggaggaagaggaugaaga

SEQ ID NO: 13330 - RNA, 19 nt, Artificial Sequence
  Synthetic
gaacaucucuauucugcaa

SEQ ID NO: 13331 - RNA, 19 nt, Artificial Sequence
  Synthetic
agaacaugcuggaccgcuu

SEQ ID NO: 13332 - RNA, 19 nt, Artificial Sequence
  Synthetic
cuuagaagguucccagaca

SEQ ID NO: 13333 - RNA, 19 nt, Artificial Sequence
  Synthetic
gaacacagaugaugucaac

SEQ ID NO: 13334 - RNA, 19 nt, Artificial Sequence
  Synthetic
gaggagaugacgggcgaau

SEQ ID NO: 13335 - RNA, 19 nt, Artificial Sequence
  Synthetic
caggacgcugaaagggaaa

SEQ ID NO: 13336 - RNA, 19 nt, Artificial Sequence
  Synthetic
acgaggagaugacgggcga

SEQ ID NO: 13337 - RNA, 19 nt, Artificial Sequence
  Synthetic
ccaccucgggaaagaguuu

SEQ ID NO: 13338 - RNA, 19 nt, Artificial Sequence
  Synthetic
cgugcugaguucuguguuu

SEQ ID NO: 13339 - RNA, 19 nt, Artificial Sequence
  Synthetic
ugagaagaccaaugagaug

SEQ ID NO: 13340 - RNA, 19 nt, Artificial Sequence
  Synthetic
gaagaaugcuuagaagguu

SEQ ID NO: 13341 - RNA, 19 nt, Artificial Sequence
  Synthetic
ugaagaaugcuuagaaggu

SEQ ID NO: 13342 - RNA, 19 nt, Artificial Sequence
  Synthetic
ggagaugacgggcgaauag

SEQ ID NO: 13343 - RNA, 19 nt, Artificial Sequence
  Synthetic
cgggaaagaguuuaaugga

SEQ ID NO: 13344 - RNA, 19 nt, Artificial Sequence
  Synthetic
ucaaggagguuucugagau

SEQ ID NO: 13345 - RNA, 19 nt, Artificial Sequence
  Synthetic
ggagccaccucgggaaaga

SEQ ID NO: 13346 - RNA, 19 nt, Artificial Sequence
  Synthetic
ugagcauggugaacacaga

SEQ ID NO: 13347 - RNA, 19 nt, Artificial Sequence
  Synthetic
guucuguguuucucugaau

SEQ ID NO: 13348 - RNA, 19 nt, Artificial Sequence
  Synthetic
ggaggaggagaaagagaug

SEQ ID NO: 13349 - RNA, 19 nt, Artificial Sequence
  Synthetic
cgaggacccuaguagagau

SEQ ID NO: 13350 - RNA, 19 nt, Artificial Sequence
  Synthetic
ugacgucugcucugaagaa

SEQ ID NO: 13351 - RNA, 19 nt, Artificial Sequence
  Synthetic
uggcugagguggaggaaua

SEQ ID NO: 13352 - RNA, 19 nt, Artificial Sequence
  Synthetic
acgaauugguggagacauu

SEQ ID NO: 13353 - RNA, 19 nt, Artificial Sequence
  Synthetic
gacuaaaggcuaugacaaa

SEQ ID NO: 13354 - RNA, 19 nt, Artificial Sequence
  Synthetic
ggacuaaaggcuaugacaa

SEQ ID NO: 13355 - RNA, 19 nt, Artificial Sequence
  Synthetic
ggacgauguuaaagcagaa

SEQ ID NO: 13356 - RNA, 19 nt, Artificial Sequence
  Synthetic
aauacaaacuggugcggaa

SEQ ID NO: 13357 - RNA, 19 nt, Artificial Sequence
  Synthetic
ugaaugaggaacagaagaa

SEQ ID NO: 13358 - RNA, 19 nt, Artificial Sequence
  Synthetic
ggcaaggacuaaaggcuau

SEQ ID NO: 13359 - RNA, 19 nt, Artificial Sequence
  Synthetic
uugaauacgugcauacaaa

SEQ ID NO: 13360 - RNA, 19 nt, Artificial Sequence
  Synthetic
acucguugugggagggaaa

SEQ ID NO: 13361 - RNA, 19 nt, Artificial Sequence
  Synthetic
gcgaggaaguagcagugaa

SEQ ID NO: 13362 - RNA, 19 nt, Artificial Sequence
  Synthetic
uggcaaggacuaaaggcua

SEQ ID NO: 13363 - RNA, 19 nt, Artificial Sequence
  Synthetic
cugcagaauucgccaugua

SEQ ID NO: 13364 - RNA, 19 nt, Artificial Sequence
  Synthetic
gcacugguauggucaggaa

SEQ ID NO: 13365 - RNA, 19 nt, Artificial Sequence
  Synthetic
ucaagaagguucaccauga

SEQ ID NO: 13366 - RNA, 19 nt, Artificial Sequence
  Synthetic
ccaccaacggcgaggaagu

SEQ ID NO: 13367 - RNA, 19 nt, Artificial Sequence
  Synthetic
gagcaaacucuacacgauu

SEQ ID NO: 13368 - RNA, 19 nt, Artificial Sequence
  Synthetic
cagugaagcuggaaucuca

SEQ ID NO: 13369 - RNA, 19 nt, Artificial Sequence
  Synthetic
cguacagagaagauaaaca

SEQ ID NO: 13370 - RNA, 19 nt, Artificial Sequence
  Synthetic
gcuuaccugugaagacaua

SEQ ID NO: 13371 - RNA, 19 nt, Artificial Sequence
  Synthetic
gaacuagacugcuuugaga

SEQ ID NO: 13372 - RNA, 19 nt, Artificial Sequence
  Synthetic
gauauucccuugcaaguaa

SEQ ID NO: 13373 - RNA, 19 nt, Artificial Sequence
  Synthetic
gagcguuggugaugcugua

SEQ ID NO: 13374 - RNA, 19 nt, Artificial Sequence
  Synthetic
uugaggaagucccagauua

SEQ ID NO: 13375 - RNA, 19 nt, Artificial Sequence
  Synthetic
aagauuagugagaagaaga

SEQ ID NO: 13376 - RNA, 19 nt, Artificial Sequence
  Synthetic
acauggaauccuuaggcua

SEQ ID NO: 13377 - RNA, 19 nt, Artificial Sequence
  Synthetic
agauaucauuucagaagga

SEQ ID NO: 13378 - RNA, 19 nt, Artificial Sequence
  Synthetic
cugcaaagguuguaaaugc

SEQ ID NO: 13379 - RNA, 19 nt, Artificial Sequence
  Synthetic
gauaacuaagcgugaauga

SEQ ID NO: 13380 - RNA, 19 nt, Artificial Sequence
  Synthetic
gcaagaggaugcugggaaa

SEQ ID NO: 13381 - RNA, 19 nt, Artificial Sequence
  Synthetic
guguaaagcuuguagucuu

SEQ ID NO: 13382 - RNA, 19 nt, Artificial Sequence
  Synthetic
ugaagaaggugacgauaau

SEQ ID NO: 13383 - RNA, 19 nt, Artificial Sequence
  Synthetic
ccauuaagauccuggacaa

SEQ ID NO: 13384 - RNA, 19 nt, Artificial Sequence
  Synthetic
gggcagaaaccguggccaa

SEQ ID NO: 13385 - RNA, 19 nt, Artificial Sequence
  Synthetic
aggaagaaggcuuuggaaa

SEQ ID NO: 13386 - RNA, 19 nt, Artificial Sequence
  Synthetic
cagaagagcauauucgaaa

SEQ ID NO: 13387 - RNA, 19 nt, Artificial Sequence
  Synthetic
caacuugaguggagacauu

SEQ ID NO: 13388 - RNA, 19 nt, Artificial Sequence
  Synthetic
gggcauuacagaagagcau

SEQ ID NO: 13389 - RNA, 19 nt, Artificial Sequence
  Synthetic
ugggaaaugucuugaguga

SEQ ID NO: 13390 - RNA, 19 nt, Artificial Sequence
  Synthetic
cuaccagacccuaaagaaa

SEQ ID NO: 13391 - RNA, 19 nt, Artificial Sequence
  Synthetic
gagaagguggugagggaga

SEQ ID NO: 13392 - RNA, 19 nt, Artificial Sequence
  Synthetic
ucgaaauaaccaagggaga

SEQ ID NO: 13393 - RNA, 19 nt, Artificial Sequence
  Synthetic
cgagacagcucacggcuua

SEQ ID NO: 13394 - RNA, 19 nt, Artificial Sequence
  Synthetic
agaaagagaagcaugaaau

SEQ ID NO: 13395 - RNA, 19 nt, Artificial Sequence
  Synthetic
gugaaaugcugaacacuuu

SEQ ID NO: 13396 - RNA, 19 nt, Artificial Sequence
  Synthetic
agaccaaguuagaccagaa

SEQ ID NO: 13397 - RNA, 19 nt, Artificial Sequence
  Synthetic
augagaagguggugaggga

SEQ ID NO: 13398 - RNA, 19 nt, Artificial Sequence
  Synthetic
gugccuaauuguacagcua

SEQ ID NO: 13399 - RNA, 19 nt, Artificial Sequence
  Synthetic
aagaaaagguggccauuaa

SEQ ID NO: 13400 - RNA, 19 nt, Artificial Sequence
  Synthetic
ggauaggcuucuaccgaau

SEQ ID NO: 13401 - RNA, 19 nt, Artificial Sequence
  Synthetic
cuuuagaacauuugggcau

SEQ ID NO: 13402 - RNA, 19 nt, Artificial Sequence
  Synthetic
agaggaagguucaucuaaa

SEQ ID NO: 13403 - RNA, 19 nt, Artificial Sequence
  Synthetic
cuaccgaauucgaggggaa

SEQ ID NO: 13404 - RNA, 19 nt, Artificial Sequence
  Synthetic
ccagaaggcuuauuugcaa

SEQ ID NO: 13405 - RNA, 19 nt, Artificial Sequence
  Synthetic
aagagaagcaugaaaugaa

SEQ ID NO: 13406 - RNA, 19 nt, Artificial Sequence
  Synthetic
gauaagacacacauccaaa

SEQ ID NO: 13407 - RNA, 19 nt, Artificial Sequence
  Synthetic
gaaauaaccaagggagaga

SEQ ID NO: 13408 - RNA, 19 nt, Artificial Sequence
  Synthetic
aagaagaaaaugaggucaa

SEQ ID NO: 13409 - RNA, 19 nt, Artificial Sequence
  Synthetic
ggaaaucggaaguggaaac

SEQ ID NO: 13410 - RNA, 19 nt, Artificial Sequence
  Synthetic
gcgcgacaguguagaaagu

SEQ ID NO: 13411 - RNA, 19 nt, Artificial Sequence
  Synthetic
guccaaaggaagaaggcuu

SEQ ID NO: 13412 - RNA, 19 nt, Artificial Sequence
  Synthetic
cccugcagcuugacagaaa

SEQ ID NO: 13413 - RNA, 19 nt, Artificial Sequence
  Synthetic
gaacaagucuuaacagaua

SEQ ID NO: 13414 - RNA, 19 nt, Artificial Sequence
  Synthetic
gucaaaugcuucagguaaa

SEQ ID NO: 13415 - RNA, 19 nt, Artificial Sequence
  Synthetic
gauuauagacaaagccaaa

SEQ ID NO: 13416 - RNA, 19 nt, Artificial Sequence
  Synthetic
ccaaguacacugagagaga

SEQ ID NO: 13417 - RNA, 19 nt, Artificial Sequence
  Synthetic
ggucaaagguggagaucuc

SEQ ID NO: 13418 - RNA, 19 nt, Artificial Sequence
  Synthetic
agaacaaucuccaggaaga

SEQ ID NO: 13419 - RNA, 19 nt, Artificial Sequence
  Synthetic
aggaaguuucagaggauua

SEQ ID NO: 13420 - RNA, 19 nt, Artificial Sequence
  Synthetic
cugaaggugugaauggaaa

SEQ ID NO: 13421 - RNA, 19 nt, Artificial Sequence
  Synthetic
agucaaaugcuucagguaa

SEQ ID NO: 13422 - RNA, 19 nt, Artificial Sequence
  Synthetic
gggagagccugaagcagaa

SEQ ID NO: 13423 - RNA, 19 nt, Artificial Sequence
  Synthetic
ccaggaaguuucagaggau

SEQ ID NO: 13424 - RNA, 19 nt, Artificial Sequence
  Synthetic
gagcuugaccguugcauaa

SEQ ID NO: 13425 - RNA, 19 nt, Artificial Sequence
  Synthetic
cccuaaagauuauagacaa

SEQ ID NO: 13426 - RNA, 19 nt, Artificial Sequence
  Synthetic
ggaaggugcucccuggaua

SEQ ID NO: 13427 - RNA, 19 nt, Artificial Sequence
  Synthetic
guaucgagcuggagcacuu

SEQ ID NO: 13428 - RNA, 19 nt, Artificial Sequence
  Synthetic
gaaaggaguuugcccuaaa

SEQ ID NO: 13429 - RNA, 19 nt, Artificial Sequence
  Synthetic
caaauguuguggaaaggaa

SEQ ID NO: 13430 - RNA, 19 nt, Artificial Sequence
  Synthetic
aagcugaggugacagguaa

SEQ ID NO: 13431 - RNA, 19 nt, Artificial Sequence
  Synthetic
gaaaggaacaccugauuga

SEQ ID NO: 13432 - RNA, 19 nt, Artificial Sequence
  Synthetic
ggaguuugcccuaaagauu

SEQ ID NO: 13433 - RNA, 19 nt, Artificial Sequence
  Synthetic
gaaccaagucuuugaaacu

SEQ ID NO: 13434 - RNA, 19 nt, Artificial Sequence
  Synthetic
agacaucaaaccagagaau

SEQ ID NO: 13435 - RNA, 19 nt, Artificial Sequence
  Synthetic
gaacaucaagggugggaca

SEQ ID NO: 13436 - RNA, 19 nt, Artificial Sequence
  Synthetic
cgggacaaauccugaguca

SEQ ID NO: 13437 - RNA, 19 nt, Artificial Sequence
  Synthetic
gucaaagaguguauagaca

SEQ ID NO: 13438 - RNA, 19 nt, Artificial Sequence
  Synthetic
ccaaggaauuaaucaguca

SEQ ID NO: 13439 - RNA, 19 nt, Artificial Sequence
  Synthetic
gcucggagaagaaggccaa

SEQ ID NO: 13440 - RNA, 19 nt, Artificial Sequence
  Synthetic
acuccuaaaucuacgaaau

SEQ ID NO: 13441 - RNA, 19 nt, Artificial Sequence
  Synthetic
aggagaaugugcaacuuua

SEQ ID NO: 13442 - RNA, 19 nt, Artificial Sequence
  Synthetic
gauuaaagauuucugcuca

SEQ ID NO: 13443 - RNA, 19 nt, Artificial Sequence
  Synthetic
ucaagaucauucagcaaua

SEQ ID NO: 13444 - RNA, 19 nt, Artificial Sequence
  Synthetic
ccgcggaucuugagaagga

SEQ ID NO: 13445 - RNA, 19 nt, Artificial Sequence
  Synthetic
agcucaacgugcuggauua

SEQ ID NO: 13446 - RNA, 19 nt, Artificial Sequence
  Synthetic
gcacagagcccggaagagu

SEQ ID NO: 13447 - RNA, 19 nt, Artificial Sequence
  Synthetic
gugaagggacugaucaaga

SEQ ID NO: 13448 - RNA, 19 nt, Artificial Sequence
  Synthetic
ggauuacagccuccugaua

SEQ ID NO: 13449 - RNA, 19 nt, Artificial Sequence
  Synthetic
gcugaaggaccucaacuuu

SEQ ID NO: 13450 - RNA, 19 nt, Artificial Sequence
  Synthetic
cgagagguaugacaucaaa

SEQ ID NO: 13451 - RNA, 19 nt, Artificial Sequence
  Synthetic
caagaucauucagcaauaa

SEQ ID NO: 13452 - RNA, 19 nt, Artificial Sequence
  Synthetic
ugaagggacugaucaagau

SEQ ID NO: 13453 - RNA, 19 nt, Artificial Sequence
  Synthetic
gagcucaacgugcuggauu

SEQ ID NO: 13454 - RNA, 19 nt, Artificial Sequence
  Synthetic
ccugauagccuuccaacgu

SEQ ID NO: 13455 - RNA, 19 nt, Artificial Sequence
  Synthetic
cagcauccccuaacuaaua

SEQ ID NO: 13456 - RNA, 19 nt, Artificial Sequence
  Synthetic
cugaaggaccucaacuuuc

SEQ ID NO: 13457 - RNA, 19 nt, Artificial Sequence
  Synthetic
gauccggaccagccaagga

SEQ ID NO: 13458 - RNA, 19 nt, Artificial Sequence
  Synthetic
gaagagucgagagcccaaa

SEQ ID NO: 13459 - RNA, 19 nt, Artificial Sequence
  Synthetic
gauuacagccuccugauag

SEQ ID NO: 13460 - RNA, 19 nt, Artificial Sequence
  Synthetic
ucaacgugcuggauuacag

SEQ ID NO: 13461 - RNA, 19 nt, Artificial Sequence
  Synthetic
gaugggcucacgccaggaa

SEQ ID NO: 13462 - RNA, 19 nt, Artificial Sequence
  Synthetic
gggcagcagccucaucuuc

SEQ ID NO: 13463 - RNA, 19 nt, Artificial Sequence
  Synthetic
gccaaggacuccccuacuu

SEQ ID NO: 13464 - RNA, 19 nt, Artificial Sequence
  Synthetic
ggcccgagcagcgcuauuu

SEQ ID NO: 13465 - RNA, 19 nt, Artificial Sequence
  Synthetic
caaggacuccccuacuuua

SEQ ID NO: 13466 - RNA, 19 nt, Artificial Sequence
  Synthetic
uaaccgcgcagucccguuu

SEQ ID NO: 13467 - RNA, 19 nt, Artificial Sequence
  Synthetic
gcucaugacuucagcgaua

SEQ ID NO: 13468 - RNA, 19 nt, Artificial Sequence
  Synthetic
gagaagaggcucagcgaga

SEQ ID NO: 13469 - RNA, 19 nt, Artificial Sequence
  Synthetic
aggaagagcggcagggcaa

SEQ ID NO: 13470 - RNA, 19 nt, Artificial Sequence
  Synthetic
gaucaaggcugccgaguau

SEQ ID NO: 13471 - RNA, 19 nt, Artificial Sequence
  Synthetic
gcauagagagccaggaaga

SEQ ID NO: 13472 - RNA, 19 nt, Artificial Sequence
  Synthetic
uggaaauaaugcaaagaga

SEQ ID NO: 13473 - RNA, 19 nt, Artificial Sequence
  Synthetic
ggaacauggugcucaacaa

SEQ ID NO: 13474 - RNA, 19 nt, Artificial Sequence
  Synthetic
ggccaaggcucuaggaagu

SEQ ID NO: 13475 - RNA, 19 nt, Artificial Sequence
  Synthetic
gcaagugguuccugacauu

SEQ ID NO: 13476 - RNA, 19 nt, Artificial Sequence
  Synthetic
gcggagagcaucagacaga

SEQ ID NO: 13477 - RNA, 19 nt, Artificial Sequence
  Synthetic
ggaaagauggcacggauga

SEQ ID NO: 13478 - RNA, 19 nt, Artificial Sequence
  Synthetic
agacagaggagcuggggaa

SEQ ID NO: 13479 - RNA, 19 nt, Artificial Sequence
  Synthetic
cugaaggaccagagaggga

SEQ ID NO: 13480 - RNA, 19 nt, Artificial Sequence
  Synthetic
ggcucuaggaagugggauu

SEQ ID NO: 13481 - RNA, 19 nt, Artificial Sequence
  Synthetic
ggaagcaucuggugagcga

SEQ ID NO: 13482 - RNA, 19 nt, Artificial Sequence
  Synthetic
caagaggacacaucggaua

SEQ ID NO: 13483 - RNA, 19 nt, Artificial Sequence
  Synthetic
ugguuaagaagaugaagaa

SEQ ID NO: 13484 - RNA, 19 nt, Artificial Sequence
  Synthetic
ccaaaugagcaaugcggau

SEQ ID NO: 13485 - RNA, 19 nt, Artificial Sequence
  Synthetic
ucaucaaccugcagcacua

SEQ ID NO: 13486 - RNA, 19 nt, Artificial Sequence
  Synthetic
gaggaaagauggcacggau

SEQ ID NO: 13487 - RNA, 19 nt, Artificial Sequence
  Synthetic
gugaaaucguugaggacac

SEQ ID NO: 13488 - RNA, 19 nt, Artificial Sequence
  Synthetic
ggaccaaggcauagagagc

SEQ ID NO: 13489 - RNA, 19 nt, Artificial Sequence
  Synthetic
agagggagacugugguaau

SEQ ID NO: 13490 - RNA, 19 nt, Artificial Sequence
  Synthetic
caagcauagugcaguguuu

SEQ ID NO: 13491 - RNA, 19 nt, Artificial Sequence
  Synthetic
aggcgaaggugacggagga

SEQ ID NO: 13492 - RNA, 19 nt, Artificial Sequence
  Synthetic
aggcauagagagccaggaa

SEQ ID NO: 13493 - RNA, 19 nt, Artificial Sequence
  Synthetic
aagaggacacaucggauaa

SEQ ID NO: 13494 - RNA, 19 nt, Artificial Sequence
  Synthetic
caaaugagcaaugcggaua

SEQ ID NO: 13495 - RNA, 19 nt, Artificial Sequence
  Synthetic
aggcucagcgagagggaga

SEQ ID NO: 13496 - RNA, 19 nt, Artificial Sequence
  Synthetic
agaucaaggcugccgagua

SEQ ID NO: 13497 - RNA, 19 nt, Artificial Sequence
  Synthetic
gcaaauaugucgugaggca

SEQ ID NO: 13498 - RNA, 19 nt, Artificial Sequence
  Synthetic
cagaagaagugcuaaguuu

SEQ ID NO: 13499 - RNA, 19 nt, Artificial Sequence
  Synthetic
ggaaagaagcuauuaaaca

SEQ ID NO: 13500 - RNA, 19 nt, Artificial Sequence
  Synthetic
acaaagacaccuacaguua

SEQ ID NO: 13501 - RNA, 19 nt, Artificial Sequence
  Synthetic
caaaagaaauacuggagaa

SEQ ID NO: 13502 - RNA, 19 nt, Artificial Sequence
  Synthetic
ggaagaaccuuuaucguuu

SEQ ID NO: 13503 - RNA, 19 nt, Artificial Sequence
  Synthetic
gugaauugguggaauauuu

SEQ ID NO: 13504 - RNA, 19 nt, Artificial Sequence
  Synthetic
gacgugaauugguggaaua

SEQ ID NO: 13505 - RNA, 19 nt, Artificial Sequence
  Synthetic
guucauugguugcaagaau

SEQ ID NO: 13506 - RNA, 19 nt, Artificial Sequence
  Synthetic
ugaucaaagucaagcauuu

SEQ ID NO: 13507 - RNA, 19 nt, Artificial Sequence
  Synthetic
uuuauaagcacgauggaaa

SEQ ID NO: 13508 - RNA, 19 nt, Artificial Sequence
  Synthetic
aagaaauacuggagaauag

SEQ ID NO: 13509 - RNA, 19 nt, Artificial Sequence
  Synthetic
cagucaacuuucuggcaaa

SEQ ID NO: 13510 - RNA, 19 nt, Artificial Sequence
  Synthetic
ccaaaaucgucucagaaaa

SEQ ID NO: 13511 - RNA, 19 nt, Artificial Sequence
  Synthetic
ccuuuuaggagcaagauua

SEQ ID NO: 13512 - RNA, 19 nt, Artificial Sequence
  Synthetic
acgaauuugugaaguggaa

SEQ ID NO: 13513 - RNA, 19 nt, Artificial Sequence
  Synthetic
gcgacaggcuugaacaaaa

SEQ ID NO: 13514 - RNA, 19 nt, Artificial Sequence
  Synthetic
gaagaagugcuaaguuuua

SEQ ID NO: 13515 - RNA, 19 nt, Artificial Sequence
  Synthetic
cagaaaagguggcauggaa

SEQ ID NO: 13516 - RNA, 19 nt, Artificial Sequence
  Synthetic
gcugcaagguaaagaaucu

SEQ ID NO: 13517 - RNA, 19 nt, Artificial Sequence
  Synthetic
gguggaauauuuacaaaga

SEQ ID NO: 13518 - RNA, 19 nt, Artificial Sequence
  Synthetic
gcaaacacuuacuggggaa

SEQ ID NO: 13519 - RNA, 19 nt, Artificial Sequence
  Synthetic
ggaugaacaccaaacauuu

SEQ ID NO: 13520 - RNA, 19 nt, Artificial Sequence
  Synthetic
gcuaaugaagauauccaua

SEQ ID NO: 13521 - RNA, 19 nt, Artificial Sequence
  Synthetic
gaauuugugaaguggaaaa

SEQ ID NO: 13522 - RNA, 19 nt, Artificial Sequence
  Synthetic
ggagagucuuggaggcguu

SEQ ID NO: 13523 - RNA, 19 nt, Artificial Sequence
  Synthetic
guguauugaugguccaaaa

SEQ ID NO: 13524 - RNA, 19 nt, Artificial Sequence
  Synthetic
caguucagguugugugaca

SEQ ID NO: 13525 - RNA, 19 nt, Artificial Sequence
  Synthetic
uuaaucaccuugaggaaga

SEQ ID NO: 13526 - RNA, 19 nt, Artificial Sequence
  Synthetic
gcuaaaaucaagacgugaa

SEQ ID NO: 13527 - RNA, 19 nt, Artificial Sequence
  Synthetic
ccucaggaguggagagaau

SEQ ID NO: 13528 - RNA, 19 nt, Artificial Sequence
  Synthetic
ggaugaggaaguaggguua

SEQ ID NO: 13529 - RNA, 19 nt, Artificial Sequence
  Synthetic
ggaugcugcucuagggaua

SEQ ID NO: 13530 - RNA, 19 nt, Artificial Sequence
  Synthetic
acaaugaaaugaagaggaa

SEQ ID NO: 13531 - RNA, 19 nt, Artificial Sequence
  Synthetic
gggaaaggaggaacaauua

SEQ ID NO: 13532 - RNA, 19 nt, Artificial Sequence
  Synthetic
gcagaaagguagggcagua

SEQ ID NO: 13533 - RNA, 19 nt, Artificial Sequence
  Synthetic
ugauggagguggagcaaga

SEQ ID NO: 13534 - RNA, 19 nt, Artificial Sequence
  Synthetic
acugaggaguuuugugaaa

SEQ ID NO: 13535 - RNA, 19 nt, Artificial Sequence
  Synthetic
gagcaagaccagcggauca

SEQ ID NO: 13536 - RNA, 19 nt, Artificial Sequence
  Synthetic
cggaggugacugacagaua

SEQ ID NO: 13537 - RNA, 19 nt, Artificial Sequence
  Synthetic
gauccuggcuggugacuau

SEQ ID NO: 13538 - RNA, 19 nt, Artificial Sequence
  Synthetic
gcgacaagaagaacuauaa

SEQ ID NO: 13539 - RNA, 19 nt, Artificial Sequence
  Synthetic
agguggaagaagaugauua

SEQ ID NO: 13540 - RNA, 19 nt, Artificial Sequence
  Synthetic
augaggagguggaagaaga

SEQ ID NO: 13541 - RNA, 19 nt, Artificial Sequence
  Synthetic
caucaagacugaggaguuu

SEQ ID NO: 13542 - RNA, 19 nt, Artificial Sequence
  Synthetic
cugaagaacucgaagauug

SEQ ID NO: 13543 - RNA, 19 nt, Artificial Sequence
  Synthetic
acagauaugauuugggaca

SEQ ID NO: 13544 - RNA, 19 nt, Artificial Sequence
  Synthetic
ggaagaaggcuguccgagu

SEQ ID NO: 13545 - RNA, 19 nt, Artificial Sequence
  Synthetic
ucuaugaggagguggaaga

SEQ ID NO: 13546 - RNA, 19 nt, Artificial Sequence
  Synthetic
gggcagaagcuuccauuuu

SEQ ID NO: 13547 - RNA, 19 nt, Artificial Sequence
  Synthetic
uggaagaagaugauuauga

SEQ ID NO: 13548 - RNA, 19 nt, Artificial Sequence
  Synthetic
gguggaagaagaugauuau

SEQ ID NO: 13549 - RNA, 19 nt, Artificial Sequence
  Synthetic
ggaagaggcugcugguugu

SEQ ID NO: 13550 - RNA, 19 nt, Artificial Sequence
  Synthetic
ucaucaagacugaggaguu

SEQ ID NO: 13551 - RNA, 19 nt, Artificial Sequence
  Synthetic
cgaagauugucaucaguga

SEQ ID NO: 13552 - RNA, 19 nt, Artificial Sequence
  Synthetic
agaagaugauuaugagaac

SEQ ID NO: 13553 - RNA, 19 nt, Artificial Sequence
  Synthetic
gcggaaagcugccaagaac

SEQ ID NO: 13554 - RNA, 19 nt, Artificial Sequence
  Synthetic
gauuaugagaaccaugaua

SEQ ID NO: 13555 - RNA, 19 nt, Artificial Sequence
  Synthetic
ggaaagcugccaagaacga

SEQ ID NO: 13556 - RNA, 19 nt, Artificial Sequence
  Synthetic
gcaagauccuggcugguga

SEQ ID NO: 13557 - RNA, 19 nt, Artificial Sequence
  Synthetic
guacaggugucgagaagaa

SEQ ID NO: 13558 - RNA, 19 nt, Artificial Sequence
  Synthetic
gugagaagauacaggaaga

SEQ ID NO: 13559 - RNA, 19 nt, Artificial Sequence
  Synthetic
acagaaggaugcagggaga

SEQ ID NO: 13560 - RNA, 19 nt, Artificial Sequence
  Synthetic
ggaacuaacuggagaaggu

SEQ ID NO: 13561 - RNA, 19 nt, Artificial Sequence
  Synthetic
ggugcaagauccagaacau

SEQ ID NO: 13562 - RNA, 19 nt, Artificial Sequence
  Synthetic
gcagagacacagcuagaaa

SEQ ID NO: 13563 - RNA, 19 nt, Artificial Sequence
  Synthetic
agaagaaugugcaggcaga

SEQ ID NO: 13564 - RNA, 19 nt, Artificial Sequence
  Synthetic
gcaccaugacugaguacaa

SEQ ID NO: 13565 - RNA, 19 nt, Artificial Sequence
  Synthetic
gggcagagacacagcuaga

SEQ ID NO: 13566 - RNA, 19 nt, Artificial Sequence
  Synthetic
gagaagagauugagaugac

SEQ ID NO: 13567 - RNA, 19 nt, Artificial Sequence
  Synthetic
ugacaugggccaaggauca

SEQ ID NO: 13568 - RNA, 19 nt, Artificial Sequence
  Synthetic
ggacaagcucuuugggcga

SEQ ID NO: 13569 - RNA, 19 nt, Artificial Sequence
  Synthetic
ucgccaaguugaagcgcaa

SEQ ID NO: 13570 - RNA, 19 nt, Artificial Sequence
  Synthetic
gcaggugggaggagagaga

SEQ ID NO: 13571 - RNA, 19 nt, Artificial Sequence
  Synthetic
ggacuuacgccuuuggaau

SEQ ID NO: 13572 - RNA, 19 nt, Artificial Sequence
  Synthetic
cagagaagaaggugaaguu

SEQ ID NO: 13573 - RNA, 19 nt, Artificial Sequence
  Synthetic
caacauucuuagugacuca

SEQ ID NO: 13574 - RNA, 19 nt, Artificial Sequence
  Synthetic
gcacagaagggcaugauga

SEQ ID NO: 13575 - RNA, 19 nt, Artificial Sequence
  Synthetic
agauaagggcacacaggaa

SEQ ID NO: 13576 - RNA, 19 nt, Artificial Sequence
  Synthetic
ccacucaguuguugggaca

SEQ ID NO: 13577 - RNA, 19 nt, Artificial Sequence
  Synthetic
uggaggaagaccugggcaa

SEQ ID NO: 13578 - RNA, 19 nt, Artificial Sequence
  Synthetic
agauacaggaagacaggaa

SEQ ID NO: 13579 - RNA, 19 nt, Artificial Sequence
  Synthetic
ugaaguuggagaagagauu

SEQ ID NO: 13580 - RNA, 19 nt, Artificial Sequence
  Synthetic
ugaacuggauggagacuuu

SEQ ID NO: 13581 - RNA, 19 nt, Artificial Sequence
  Synthetic
cuaccaaacuccgaggaua

SEQ ID NO: 13582 - RNA, 19 nt, Artificial Sequence
  Synthetic
agggaagggcagagacaca

SEQ ID NO: 13583 - RNA, 19 nt, Artificial Sequence
  Synthetic
ucauagauucccugaagaa

SEQ ID NO: 13584 - RNA, 19 nt, Artificial Sequence
  Synthetic
agagagaugccgagggcca

SEQ ID NO: 13585 - RNA, 19 nt, Artificial Sequence
  Synthetic
auacggagcuggaccgcua

SEQ ID NO: 13586 - RNA, 19 nt, Artificial Sequence
  Synthetic
gaagaggaacacaaaggaa

SEQ ID NO: 13587 - RNA, 19 nt, Artificial Sequence
  Synthetic
ggaacaagauucugcacaa

SEQ ID NO: 13588 - RNA, 19 nt, Artificial Sequence
  Synthetic
ccaagaaggccauggacua

SEQ ID NO: 13589 - RNA, 19 nt, Artificial Sequence
  Synthetic
acccagaaguggagaagaa

SEQ ID NO: 13590 - RNA, 19 nt, Artificial Sequence
  Synthetic
aggucaagcuaguggauuu

SEQ ID NO: 13591 - RNA, 19 nt, Artificial Sequence
  Synthetic
gugaaauacgagcggauua

SEQ ID NO: 13592 - RNA, 19 nt, Artificial Sequence
  Synthetic
gagaaagaggagacagaau

SEQ ID NO: 13593 - RNA, 19 nt, Artificial Sequence
  Synthetic
agaaagaggagacagaaua

SEQ ID NO: 13594 - RNA, 19 nt, Artificial Sequence
  Synthetic
gaagagagaacaaggauga

SEQ ID NO: 13595 - RNA, 19 nt, Artificial Sequence
  Synthetic
gcauagaggagcagaagga

SEQ ID NO: 13596 - RNA, 19 nt, Artificial Sequence
  Synthetic
ggauuaaguuccuggucau

SEQ ID NO: 13597 - RNA, 19 nt, Artificial Sequence
  Synthetic
gugagaaagaggagacaga

SEQ ID NO: 13598 - RNA, 19 nt, Artificial Sequence
  Synthetic
cagagaaugcugaggucaa

SEQ ID NO: 13599 - RNA, 19 nt, Artificial Sequence
  Synthetic
gccuauaucugcagggaga

SEQ ID NO: 13600 - RNA, 19 nt, Artificial Sequence
  Synthetic
ggaagcagcuggaggagca

SEQ ID NO: 13601 - RNA, 19 nt, Artificial Sequence
  Synthetic
cggaggacgaggaggaaga

SEQ ID NO: 13602 - RNA, 19 nt, Artificial Sequence
  Synthetic
gcacuaccguguugugaaa

SEQ ID NO: 13603 - RNA, 19 nt, Artificial Sequence
  Synthetic
ggaaguacaagaagcgauu

SEQ ID NO: 13604 - RNA, 19 nt, Artificial Sequence
  Synthetic
ugacagccauggagaggaa

SEQ ID NO: 13605 - RNA, 19 nt, Artificial Sequence
  Synthetic
uaugauuacaggagugaua

SEQ ID NO: 13606 - RNA, 19 nt, Artificial Sequence
  Synthetic
acgaggaggaagagaucaa

SEQ ID NO: 13607 - RNA, 19 nt, Artificial Sequence
  Synthetic
gaagaagcggggugagaaa

SEQ ID NO: 13608 - RNA, 19 nt, Artificial Sequence
  Synthetic
gcagaggggagcagagaua

SEQ ID NO: 13609 - RNA, 19 nt, Artificial Sequence
  Synthetic
uggcaaaucuaucugcaaa

SEQ ID NO: 13610 - RNA, 19 nt, Artificial Sequence
  Synthetic
gaaagaggagacagaauau

SEQ ID NO: 13611 - RNA, 19 nt, Artificial Sequence
  Synthetic
ggaugaacaagcagcagaa

SEQ ID NO: 13612 - RNA, 19 nt, Artificial Sequence
  Synthetic
gaauaugaguacagcggca

SEQ ID NO: 13613 - RNA, 19 nt, Artificial Sequence
  Synthetic
ggaacaaacugcgggugua

SEQ ID NO: 13614 - RNA, 19 nt, Artificial Sequence
  Synthetic
ugacugaccugguaaagaa

SEQ ID NO: 13615 - RNA, 19 nt, Artificial Sequence
  Synthetic
caugaaucccgcugacaaa

SEQ ID NO: 13616 - RNA, 19 nt, Artificial Sequence
  Synthetic
gcuacgaggacgagggugu

SEQ ID NO: 13617 - RNA, 19 nt, Artificial Sequence
  Synthetic
caggaaaguuugaagauau

SEQ ID NO: 13618 - RNA, 19 nt, Artificial Sequence
  Synthetic
cgucaaaaucaucgagaaa

SEQ ID NO: 13619 - RNA, 19 nt, Artificial Sequence
  Synthetic
cagcaaagaugauaccuua

SEQ ID NO: 13620 - RNA, 19 nt, Artificial Sequence
  Synthetic
gcaugaagguacagccauu

SEQ ID NO: 13621 - RNA, 19 nt, Artificial Sequence
  Synthetic
gaugcaaagcagagacuua

SEQ ID NO: 13622 - RNA, 19 nt, Artificial Sequence
  Synthetic
gcacagaucugggcaguua

SEQ ID NO: 13623 - RNA, 19 nt, Artificial Sequence
  Synthetic
acagaauggcaaagaguau

SEQ ID NO: 13624 - RNA, 19 nt, Artificial Sequence
  Synthetic
ggugacaggaggaggaaga

SEQ ID NO: 13625 - RNA, 19 nt, Artificial Sequence
  Synthetic
ccaggaaaguuugaagaua

SEQ ID NO: 13626 - RNA, 19 nt, Artificial Sequence
  Synthetic
ucagauaaguggaacuauu

SEQ ID NO: 13627 - RNA, 19 nt, Artificial Sequence
  Synthetic
gcaaagaguaugccgucaa

SEQ ID NO: 13628 - RNA, 19 nt, Artificial Sequence
  Synthetic
gcacgaagagaacgaacua

SEQ ID NO: 13629 - RNA, 19 nt, Artificial Sequence
  Synthetic
gaagaugacacaagguuuu

SEQ ID NO: 13630 - RNA, 19 nt, Artificial Sequence
  Synthetic
ucaaaaucaucgagaaaca

SEQ ID NO: 13631 - RNA, 19 nt, Artificial Sequence
  Synthetic
uuacuuggucuuugagaaa

SEQ ID NO: 13632 - RNA, 19 nt, Artificial Sequence
  Synthetic
caccuaggcuggagugcua

SEQ ID NO: 13633 - RNA, 19 nt, Artificial Sequence
  Synthetic
cuacgaaggcccugagguu

SEQ ID NO: 13634 - RNA, 19 nt, Artificial Sequence
  Synthetic
gaagauauguacaagcuga

SEQ ID NO: 13635 - RNA, 19 nt, Artificial Sequence
  Synthetic
gcaaggagguuccaucuua

SEQ ID NO: 13636 - RNA, 19 nt, Artificial Sequence
  Synthetic
agagggagccuaugccaaa

SEQ ID NO: 13637 - RNA, 19 nt, Artificial Sequence
  Synthetic
uguaucagugucagggaaa

SEQ ID NO: 13638 - RNA, 19 nt, Artificial Sequence
  Synthetic
gagccuacagaauggcaaa

SEQ ID NO: 13639 - RNA, 19 nt, Artificial Sequence
  Synthetic
gcaaagaugauaccuuaaa

SEQ ID NO: 13640 - RNA, 19 nt, Artificial Sequence
  Synthetic
aaaggugucuccagugaaa

SEQ ID NO: 13641 - RNA, 19 nt, Artificial Sequence
  Synthetic
acuuggucuuugagaaauu

SEQ ID NO: 13642 - RNA, 19 nt, Artificial Sequence
  Synthetic
cugagguaguggaggucuu

SEQ ID NO: 13643 - RNA, 19 nt, Artificial Sequence
  Synthetic
ggagaagcaagaagcauca

SEQ ID NO: 13644 - RNA, 19 nt, Artificial Sequence
  Synthetic
ccucugaauugcuuggaga

SEQ ID NO: 13645 - RNA, 19 nt, Artificial Sequence
  Synthetic
ggaguaggguguuucgaga

SEQ ID NO: 13646 - RNA, 19 nt, Artificial Sequence
  Synthetic
gcucagaaguuuuccuuua

SEQ ID NO: 13647 - RNA, 19 nt, Artificial Sequence
  Synthetic
agaagauggugcagaagaa

SEQ ID NO: 13648 - RNA, 19 nt, Artificial Sequence
  Synthetic
cagccgaacuucaggguuu

SEQ ID NO: 13649 - RNA, 19 nt, Artificial Sequence
  Synthetic
gacagaagauggugcagaa

SEQ ID NO: 13650 - RNA, 19 nt, Artificial Sequence
  Synthetic
ggugaacggccauguguua

SEQ ID NO: 13651 - RNA, 19 nt, Artificial Sequence
  Synthetic
ccuuggacuuucugcauaa

SEQ ID NO: 13652 - RNA, 19 nt, Artificial Sequence
  Synthetic
ccaaagaccucaucuccaa

SEQ ID NO: 13653 - RNA, 19 nt, Artificial Sequence
  Synthetic
cggagguaguggaggccuu

SEQ ID NO: 13654 - RNA, 19 nt, Artificial Sequence
  Synthetic
ccacggagacucugacuuu

SEQ ID NO: 13655 - RNA, 19 nt, Artificial Sequence
  Synthetic
gaagaaaccagccgaacuu

SEQ ID NO: 13656 - RNA, 19 nt, Artificial Sequence
  Synthetic
gcagaagaaaccagccgaa

SEQ ID NO: 13657 - RNA, 19 nt, Artificial Sequence
  Synthetic
gcuucuaccugguguuuga

SEQ ID NO: 13658 - RNA, 19 nt, Artificial Sequence
  Synthetic
agagcauccaggagggcaa

SEQ ID NO: 13659 - RNA, 19 nt, Artificial Sequence
  Synthetic
ggaacguccuagagcugau

SEQ ID NO: 13660 - RNA, 19 nt, Artificial Sequence
  Synthetic
ucuaccagcugcaggaaga

SEQ ID NO: 13661 - RNA, 19 nt, Artificial Sequence
  Synthetic
cagaagauggugcagaaga

SEQ ID NO: 13662 - RNA, 19 nt, Artificial Sequence
  Synthetic
gugaaugagugaagauccu

SEQ ID NO: 13663 - RNA, 19 nt, Artificial Sequence
  Synthetic
aggcuagcaucuacgacaa

SEQ ID NO: 13664 - RNA, 19 nt, Artificial Sequence
  Synthetic
ggacuggucagaaccguua

SEQ ID NO: 13665 - RNA, 19 nt, Artificial Sequence
  Synthetic
gaaccguuacugugaauga

SEQ ID NO: 13666 - RNA, 19 nt, Artificial Sequence
  Synthetic
ggacuuucugcauaacaaa

SEQ ID NO: 13667 - RNA, 19 nt, Artificial Sequence
  Synthetic
cagaaccguuacugugaau

SEQ ID NO: 13668 - RNA, 19 nt, Artificial Sequence
  Synthetic
cggaaaacauccucuguga

SEQ ID NO: 13669 - RNA, 19 nt, Artificial Sequence
  Synthetic
gggagguggagaugcugua

SEQ ID NO: 13670 - RNA, 19 nt, Artificial Sequence
  Synthetic
gaagauggugcagaagaaa

SEQ ID NO: 13671 - RNA, 19 nt, Artificial Sequence
  Synthetic
gcacuuuaauuccaaugua

SEQ ID NO: 13672 - RNA, 19 nt, Artificial Sequence
  Synthetic
agaagaggggcaagaagaa

SEQ ID NO: 13673 - RNA, 19 nt, Artificial Sequence
  Synthetic
uggacuuucugcauaacaa

SEQ ID NO: 13674 - RNA, 19 nt, Artificial Sequence
  Synthetic
guguuaauguuacgauguu

SEQ ID NO: 13675 - RNA, 19 nt, Artificial Sequence
  Synthetic
ugacggagcucagaaguuu

SEQ ID NO: 13676 - RNA, 19 nt, Artificial Sequence
  Synthetic
ccauaaagcaagugaacaa

SEQ ID NO: 13677 - RNA, 19 nt, Artificial Sequence
  Synthetic
gcugggagcuggaggguuu

SEQ ID NO: 13678 - RNA, 19 nt, Artificial Sequence
  Synthetic
cagcagucccucagagcua

SEQ ID NO: 13679 - RNA, 19 nt, Artificial Sequence
  Synthetic
gcucugagaaguuggaaga

SEQ ID NO: 13680 - RNA, 19 nt, Artificial Sequence
  Synthetic
cgguguacaaggcgacuua

SEQ ID NO: 13681 - RNA, 19 nt, Artificial Sequence
  Synthetic
gugaacaagugcaccaaga

SEQ ID NO: 13682 - RNA, 19 nt, Artificial Sequence
  Synthetic
uggaagaucugcugugcuu

SEQ ID NO: 13683 - RNA, 19 nt, Artificial Sequence
  Synthetic
cugagaaguuggaagaucu

SEQ ID NO: 13684 - RNA, 19 nt, Artificial Sequence
  Synthetic
ggacaguuaaguuugggaa

SEQ ID NO: 13685 - RNA, 19 nt, Artificial Sequence
  Synthetic
gacaguuaaguuugggaaa

SEQ ID NO: 13686 - RNA, 19 nt, Artificial Sequence
  Synthetic
caggaugucuguaaaauua

SEQ ID NO: 13687 - RNA, 19 nt, Artificial Sequence
  Synthetic
ccucagagcuaccugcgaa

SEQ ID NO: 13688 - RNA, 19 nt, Artificial Sequence
  Synthetic
cgcaaagcauugugcacuu

SEQ ID NO: 13689 - RNA, 19 nt, Artificial Sequence
  Synthetic
gugagcaggaugucuguaa

SEQ ID NO: 13690 - RNA, 19 nt, Artificial Sequence
  Synthetic
caguuaaguuugggaaagu

SEQ ID NO: 13691 - RNA, 19 nt, Artificial Sequence
  Synthetic
cgaacaucuugaucaguga

SEQ ID NO: 13692 - RNA, 19 nt, Artificial Sequence
  Synthetic
gggaaagugucucaaguac

SEQ ID NO: 13693 - RNA, 19 nt, Artificial Sequence
  Synthetic
caacgucacuuuacaccaa

SEQ ID NO: 13694 - RNA, 19 nt, Artificial Sequence
  Synthetic
ggaaagugucucaaguacu

SEQ ID NO: 13695 - RNA, 19 nt, Artificial Sequence
  Synthetic
guuucugggcugagcucaa

SEQ ID NO: 13696 - RNA, 19 nt, Artificial Sequence
  Synthetic
gagcaggaugucuguaaaa

SEQ ID NO: 13697 - RNA, 19 nt, Artificial Sequence
  Synthetic
ugggaaagugucucaagua

SEQ ID NO: 13698 - RNA, 19 nt, Artificial Sequence
  Synthetic
gguuuggcucgguguacaa

SEQ ID NO: 13699 - RNA, 19 nt, Artificial Sequence
  Synthetic
ggaucucaccucuuugaaa

SEQ ID NO: 13700 - RNA, 19 nt, Artificial Sequence
  Synthetic
cuggaggacaguuaaguuu

SEQ ID NO: 13701 - RNA, 19 nt, Artificial Sequence
  Synthetic
ugaacaagugcaccaagaa

SEQ ID NO: 13702 - RNA, 19 nt, Artificial Sequence
  Synthetic
ccaauagccuagggaccau

SEQ ID NO: 13703 - RNA, 19 nt, Artificial Sequence
  Synthetic
ugagcaggaugucuguaaa

SEQ ID NO: 13704 - RNA, 19 nt, Artificial Sequence
  Synthetic
gaacaagugcaccaagaac

SEQ ID NO: 13705 - RNA, 19 nt, Artificial Sequence
  Synthetic
ccgcgaacaucuugaucag

SEQ ID NO: 13706 - RNA, 19 nt, Artificial Sequence
  Synthetic
cagaagagcccaugggaau

SEQ ID NO: 13707 - RNA, 19 nt, Artificial Sequence
  Synthetic
caauaaugguguugaugaa

SEQ ID NO: 13708 - RNA, 19 nt, Artificial Sequence
  Synthetic
ggaagaagaagaaguacaa

SEQ ID NO: 13709 - RNA, 19 nt, Artificial Sequence
  Synthetic
ugaugaaacccuuaagaaa

SEQ ID NO: 13710 - RNA, 19 nt, Artificial Sequence
  Synthetic
cagaaggcgaugaaagaaa

SEQ ID NO: 13711 - RNA, 19 nt, Artificial Sequence
  Synthetic
gggaagaagaagaaguaca

SEQ ID NO: 13712 - RNA, 19 nt, Artificial Sequence
  Synthetic
ugaaagaaaccaaaggaau

SEQ ID NO: 13713 - RNA, 19 nt, Artificial Sequence
  Synthetic
aagaagaaguacaaagaca

SEQ ID NO: 13714 - RNA, 19 nt, Artificial Sequence
  Synthetic
gaagaaguacaaagacaaa

SEQ ID NO: 13715 - RNA, 19 nt, Artificial Sequence
  Synthetic
gaugaaacccuuaagaaau

SEQ ID NO: 13716 - RNA, 19 nt, Artificial Sequence
  Synthetic
gaggagaugacgaggaaca

SEQ ID NO: 13717 - RNA, 19 nt, Artificial Sequence
  Synthetic
cggaggagaugacgaggaa

SEQ ID NO: 13718 - RNA, 19 nt, Artificial Sequence
  Synthetic
agaagaaguacaaagacaa

SEQ ID NO: 13719 - RNA, 19 nt, Artificial Sequence
  Synthetic
ucaacaaggaugacagcaa

SEQ ID NO: 13720 - RNA, 19 nt, Artificial Sequence
  Synthetic
gaugucugcucuagggaaa

SEQ ID NO: 13721 - RNA, 19 nt, Artificial Sequence
  Synthetic
gaaagaaaccaaaggaaug

SEQ ID NO: 13722 - RNA, 19 nt, Artificial Sequence
  Synthetic
caaggaagagugaggaaga

SEQ ID NO: 13723 - RNA, 19 nt, Artificial Sequence
  Synthetic
aggaagaugggaaggagua

SEQ ID NO: 13724 - RNA, 19 nt, Artificial Sequence
  Synthetic
cagcagaacuuucgccuuu

SEQ ID NO: 13725 - RNA, 19 nt, Artificial Sequence
  Synthetic
gcggaaagugcgacucaua

SEQ ID NO: 13726 - RNA, 19 nt, Artificial Sequence
  Synthetic
ccgccuugcuuuaagacaa

SEQ ID NO: 13727 - RNA, 19 nt, Artificial Sequence
  Synthetic
gggaaggaguaccacuuua

SEQ ID NO: 13728 - RNA, 19 nt, Artificial Sequence
  Synthetic
gggacauuauccagauuau

SEQ ID NO: 13729 - RNA, 19 nt, Artificial Sequence
  Synthetic
agaagaagaaguacaaaga

SEQ ID NO: 13730 - RNA, 19 nt, Artificial Sequence
  Synthetic
gcaccaaauuugaaacagu

SEQ ID NO: 13731 - RNA, 19 nt, Artificial Sequence
  Synthetic
ccaaggagucagcaggauu

SEQ ID NO: 13732 - RNA, 19 nt, Artificial Sequence
  Synthetic
caacaaggaugacagcaau

SEQ ID NO: 13733 - RNA, 19 nt, Artificial Sequence
  Synthetic
ccuagaaaucaauggcaca

SEQ ID NO: 13734 - RNA, 19 nt, Artificial Sequence
  Synthetic
gccaaggaagagugaggaa

SEQ ID NO: 13735 - RNA, 19 nt, Artificial Sequence
  Synthetic
gguugauucuccugauaga

SEQ ID NO: 13736 - RNA, 19 nt, Artificial Sequence
  Synthetic
gggaggaagcaaaggguuu

SEQ ID NO: 13737 - RNA, 19 nt, Artificial Sequence
  Synthetic
ggauuaaaugugaaagcaa

SEQ ID NO: 13738 - RNA, 19 nt, Artificial Sequence
  Synthetic
ggaaagucccauaguaaga

SEQ ID NO: 13739 - RNA, 19 nt, Artificial Sequence
  Synthetic
gaggagaagcggaaagcau

SEQ ID NO: 13740 - RNA, 19 nt, Artificial Sequence
  Synthetic
caccaagaaugcagaguuu

SEQ ID NO: 13741 - RNA, 19 nt, Artificial Sequence
  Synthetic
ggaaggggaaggagaauaa

SEQ ID NO: 13742 - RNA, 19 nt, Artificial Sequence
  Synthetic
cgaaagacucagagcggga

SEQ ID NO: 13743 - RNA, 19 nt, Artificial Sequence
  Synthetic
caagacagccggagaacau

SEQ ID NO: 13744 - RNA, 19 nt, Artificial Sequence
  Synthetic
ccgccagguauuugugaaa

SEQ ID NO: 13745 - RNA, 19 nt, Artificial Sequence
  Synthetic
ccgcaagacagccggagaa

SEQ ID NO: 13746 - RNA, 19 nt, Artificial Sequence
  Synthetic
cuucgaggcauuauggaaa

SEQ ID NO: 13747 - RNA, 19 nt, Artificial Sequence
  Synthetic
ccauccaauucuugaguuu

SEQ ID NO: 13748 - RNA, 19 nt, Artificial Sequence
  Synthetic
gaaggagaauaaacagaau

SEQ ID NO: 13749 - RNA, 19 nt, Artificial Sequence
  Synthetic
ggaaggagaauaaacagaa

SEQ ID NO: 13750 - RNA, 19 nt, Artificial Sequence
  Synthetic
ccaagaaugcagaguuuga

SEQ ID NO: 13751 - RNA, 19 nt, Artificial Sequence
  Synthetic
gggaagaucuguuguugca

SEQ ID NO: 13752 - RNA, 19 nt, Artificial Sequence
  Synthetic
cggccgaguuugucccuua

SEQ ID NO: 13753 - RNA, 19 nt, Artificial Sequence
  Synthetic
ggagaagcggaaagcauuu

SEQ ID NO: 13754 - RNA, 19 nt, Artificial Sequence
  Synthetic
ggacaguggaggagagcag

SEQ ID NO: 13755 - RNA, 19 nt, Artificial Sequence
  Synthetic
agacgaagcuggaggccgu

SEQ ID NO: 13756 - RNA, 19 nt, Artificial Sequence
  Synthetic
acucagagcgggaagguca

SEQ ID NO: 13757 - RNA, 19 nt, Artificial Sequence
  Synthetic
aagaaagaaugcuguccua

SEQ ID NO: 13758 - RNA, 19 nt, Artificial Sequence
  Synthetic
uaagggagugggaaggaaa

SEQ ID NO: 13759 - RNA, 19 nt, Artificial Sequence
  Synthetic
cugcagagcuggaccugau

SEQ ID NO: 13760 - RNA, 19 nt, Artificial Sequence
  Synthetic
aagcauuugucaagaggga

SEQ ID NO: 13761 - RNA, 19 nt, Artificial Sequence
  Synthetic
cgaaugauguauuugacca

SEQ ID NO: 13762 - RNA, 19 nt, Artificial Sequence
  Synthetic
uaguaagaucccuggccaa

SEQ ID NO: 13763 - RNA, 19 nt, Artificial Sequence
  Synthetic
ccggagaacaucugggugu

SEQ ID NO: 13764 - RNA, 19 nt, Artificial Sequence
  Synthetic
cggcgcagccugaagaaca

SEQ ID NO: 13765 - RNA, 19 nt, Artificial Sequence
  Synthetic
gaaagaaugcuguccuaga

SEQ ID NO: 13766 - RNA, 19 nt, Artificial Sequence
  Synthetic
gcgcagagagggagagaau

SEQ ID NO: 13767 - RNA, 19 nt, Artificial Sequence
  Synthetic
agaaggaaggaguggaaua

SEQ ID NO: 13768 - RNA, 19 nt, Artificial Sequence
  Synthetic
ugugcuagaucuugggaaa

SEQ ID NO: 13769 - RNA, 19 nt, Artificial Sequence
  Synthetic
acgaagagguggccaggua

SEQ ID NO: 13770 - RNA, 19 nt, Artificial Sequence
  Synthetic
gcagaauguuuaagcuuuu

SEQ ID NO: 13771 - RNA, 19 nt, Artificial Sequence
  Synthetic
ccuggaacauggugaauau

SEQ ID NO: 13772 - RNA, 19 nt, Artificial Sequence
  Synthetic
ucaaaguggucuuagagaa

SEQ ID NO: 13773 - RNA, 19 nt, Artificial Sequence
  Synthetic
cauggugaauauaaggaaa

SEQ ID NO: 13774 - RNA, 19 nt, Artificial Sequence
  Synthetic
ccucagaauuuaaacccua

SEQ ID NO: 13775 - RNA, 19 nt, Artificial Sequence
  Synthetic
ucuuagagaagcugagcaa

SEQ ID NO: 13776 - RNA, 19 nt, Artificial Sequence
  Synthetic
gaagaucgcuuaaaggaga

SEQ ID NO: 13777 - RNA, 19 nt, Artificial Sequence
  Synthetic
acaauaucgaugaggauuu

SEQ ID NO: 13778 - RNA, 19 nt, Artificial Sequence
  Synthetic
ugagaaggaaggaguggaa

SEQ ID NO: 13779 - RNA, 19 nt, Artificial Sequence
  Synthetic
gcagagagggagagaauuc

SEQ ID NO: 13780 - RNA, 19 nt, Artificial Sequence
  Synthetic
aggaaggaguggaauauca

SEQ ID NO: 13781 - RNA, 19 nt, Artificial Sequence
  Synthetic
gggcugugcucaugguaca

SEQ ID NO: 13782 - RNA, 19 nt, Artificial Sequence
  Synthetic
ugacaauaucgaugaggau

SEQ ID NO: 13783 - RNA, 19 nt, Artificial Sequence
  Synthetic
ccgaaagagccaugagaag

SEQ ID NO: 13784 - RNA, 19 nt, Artificial Sequence
  Synthetic
gggugguagugguuaauuu

SEQ ID NO: 13785 - RNA, 19 nt, Artificial Sequence
  Synthetic
gaaagagccaugagaagga

SEQ ID NO: 13786 - RNA, 19 nt, Artificial Sequence
  Synthetic
guagauguguagucaguuu

SEQ ID NO: 13787 - RNA, 19 nt, Artificial Sequence
  Synthetic
cggugaagaucguccgcuu

SEQ ID NO: 13788 - RNA, 19 nt, Artificial Sequence
  Synthetic
uaugaaaggcaaaguccaa

SEQ ID NO: 13789 - RNA, 19 nt, Artificial Sequence
  Synthetic
cuccggagcugcugacuua

SEQ ID NO: 13790 - RNA, 19 nt, Artificial Sequence
  Synthetic
acaaggaggagaugggcuu

SEQ ID NO: 13791 - RNA, 19 nt, Artificial Sequence
  Synthetic
cgcuauuaugaaaggcaaa

SEQ ID NO: 13792 - RNA, 19 nt, Artificial Sequence
  Synthetic
agcaaaaggugguggcuga

SEQ ID NO: 13793 - RNA, 19 nt, Artificial Sequence
  Synthetic
agccagaagcacugaaaca

SEQ ID NO: 13794 - RNA, 19 nt, Artificial Sequence
  Synthetic
aggacgugauggaggaguu

SEQ ID NO: 13795 - RNA, 19 nt, Artificial Sequence
  Synthetic
guauguagacccagagugu

SEQ ID NO: 13796 - RNA, 19 nt, Artificial Sequence
  Synthetic
cugcagaccuauagauuua

SEQ ID NO: 13797 - RNA, 19 nt, Artificial Sequence
  Synthetic
ggauggagcugcuggcuuu

SEQ ID NO: 13798 - RNA, 19 nt, Artificial Sequence
  Synthetic
guggaaagcaggugugaga

SEQ ID NO: 13799 - RNA, 19 nt, Artificial Sequence
  Synthetic
ccuacgagggcgacagaaa

SEQ ID NO: 13800 - RNA, 19 nt, Artificial Sequence
  Synthetic
uuucagaggcaauagguaa

SEQ ID NO: 13801 - RNA, 19 nt, Artificial Sequence
  Synthetic
cugaauaugugguccgaga

SEQ ID NO: 13802 - RNA, 19 nt, Artificial Sequence
  Synthetic
uagaggaguuugaguguga

SEQ ID NO: 13803 - RNA, 19 nt, Artificial Sequence
  Synthetic
cugcguagauggugaaugu

SEQ ID NO: 13804 - RNA, 19 nt, Artificial Sequence
  Synthetic
gcacaauggaugggcguau

SEQ ID NO: 13805 - RNA, 19 nt, Artificial Sequence
  Synthetic
ggaccagguuuuccaggua

SEQ ID NO: 13806 - RNA, 19 nt, Artificial Sequence
  Synthetic
ggucaaugggacugagugu

SEQ ID NO: 13807 - RNA, 19 nt, Artificial Sequence
  Synthetic
gggauggguggcagggaau

SEQ ID NO: 13808 - RNA, 19 nt, Artificial Sequence
  Synthetic
gcaccucgcaugagaugaa

SEQ ID NO: 13809 - RNA, 19 nt, Artificial Sequence
  Synthetic
uggcugaggucaaggaugu

SEQ ID NO: 13810 - RNA, 19 nt, Artificial Sequence
  Synthetic
agggauggguggcagggaa

SEQ ID NO: 13811 - RNA, 19 nt, Artificial Sequence
  Synthetic
acacaaaggugcuggugcu

SEQ ID NO: 13812 - RNA, 19 nt, Artificial Sequence
  Synthetic
aaaugagagugcuguguuu

SEQ ID NO: 13813 - RNA, 19 nt, Artificial Sequence
  Synthetic
uggagagccugcagaccua

SEQ ID NO: 13814 - RNA, 19 nt, Artificial Sequence
  Synthetic
guggagcgcuguugugaau

SEQ ID NO: 13815 - RNA, 19 nt, Artificial Sequence
  Synthetic
ggagcaugccauuaaguuu

SEQ ID NO: 13816 - RNA, 19 nt, Artificial Sequence
  Synthetic
gcauggaguaccuggcaga

SEQ ID NO: 13817 - RNA, 19 nt, Artificial Sequence
  Synthetic
ccacagagugagccaguga

SEQ ID NO: 13818 - RNA, 19 nt, Artificial Sequence
  Synthetic
uugaauacgugcacagcuu

SEQ ID NO: 13819 - RNA, 19 nt, Artificial Sequence
  Synthetic
cugcacuggucuucagcua

SEQ ID NO: 13820 - RNA, 19 nt, Artificial Sequence
  Synthetic
gcguagauggugaauguca

SEQ ID NO: 13821 - RNA, 19 nt, Artificial Sequence
  Synthetic
ggaacugcaugcuggacga

SEQ ID NO: 13822 - RNA, 19 nt, Artificial Sequence
  Synthetic
gggcaagcacuuccgggua

SEQ ID NO: 13823 - RNA, 19 nt, Artificial Sequence
  Synthetic
gggcuuagggcaguggaaa

SEQ ID NO: 13824 - RNA, 19 nt, Artificial Sequence
  Synthetic
ccaauaaaggaacaaauga

SEQ ID NO: 13825 - RNA, 19 nt, Artificial Sequence
  Synthetic
ccggugacacagacacaaa

SEQ ID NO: 13826 - RNA, 19 nt, Artificial Sequence
  Synthetic
ggaagaagcuauuaaacua

SEQ ID NO: 13827 - RNA, 19 nt, Artificial Sequence
  Synthetic
gaaucuaccagcagggaaa

SEQ ID NO: 13828 - RNA, 19 nt, Artificial Sequence
  Synthetic
gaacaaagauccaucauuu

SEQ ID NO: 13829 - RNA, 19 nt, Artificial Sequence
  Synthetic
gaaagaagccugauccaaa

SEQ ID NO: 13830 - RNA, 19 nt, Artificial Sequence
  Synthetic
gauugaagaacucgagaaa

SEQ ID NO: 13831 - RNA, 19 nt, Artificial Sequence
  Synthetic
aaggauagguguuugguaa

SEQ ID NO: 13832 - RNA, 19 nt, Artificial Sequence
  Synthetic
aaucauagaccuugaggaa

SEQ ID NO: 13833 - RNA, 19 nt, Artificial Sequence
  Synthetic
guagaagucuggagauaau

SEQ ID NO: 13834 - RNA, 19 nt, Artificial Sequence
  Synthetic
aaaccuacgucaagauuaa

SEQ ID NO: 13835 - RNA, 19 nt, Artificial Sequence
  Synthetic
cagauaaaauggugaagaa

SEQ ID NO: 13836 - RNA, 19 nt, Artificial Sequence
  Synthetic
ugacagauacacagauuaa

SEQ ID NO: 13837 - RNA, 19 nt, Artificial Sequence
  Synthetic
agacauucagcaagaaaua

SEQ ID NO: 13838 - RNA, 19 nt, Artificial Sequence
  Synthetic
gggaaguuuucaaaggaau

SEQ ID NO: 13839 - RNA, 19 nt, Artificial Sequence
  Synthetic
cuaccaugcuaaaggaaau

SEQ ID NO: 13840 - RNA, 19 nt, Artificial Sequence
  Synthetic
gaaaauucaccgagacaua

SEQ ID NO: 13841 - RNA, 19 nt, Artificial Sequence
  Synthetic
gaauaacgcuagcaggaau

SEQ ID NO: 13842 - RNA, 19 nt, Artificial Sequence
  Synthetic
caacucauguuauggguua

SEQ ID NO: 13843 - RNA, 19 nt, Artificial Sequence
  Synthetic
gaucauuuacccaaggaua

SEQ ID NO: 13844 - RNA, 19 nt, Artificial Sequence
  Synthetic
ucuaguaaauguugagaca

SEQ ID NO: 13845 - RNA, 19 nt, Artificial Sequence
  Synthetic
uaacauagcugauccagaa

SEQ ID NO: 13846 - RNA, 19 nt, Artificial Sequence
  Synthetic
gagaauaacgcuagcagga

SEQ ID NO: 13847 - RNA, 19 nt, Artificial Sequence
  Synthetic
ucacaaaauuagagcgcau

SEQ ID NO: 13848 - RNA, 19 nt, Artificial Sequence
  Synthetic
ccacacaaagguuaaauua

SEQ ID NO: 13849 - RNA, 19 nt, Artificial Sequence
  Synthetic
gggaauuacugcuauugaa

SEQ ID NO: 13850 - RNA, 19 nt, Artificial Sequence
  Synthetic
uagaagacauucagcaaga

SEQ ID NO: 13851 - RNA, 19 nt, Artificial Sequence
  Synthetic
gauggaaggcagaaggaca

SEQ ID NO: 13852 - RNA, 19 nt, Artificial Sequence
  Synthetic
ggaaguuuucaaaggaauu

SEQ ID NO: 13853 - RNA, 19 nt, Artificial Sequence
  Synthetic
auuagagcgcauugggaaa

SEQ ID NO: 13854 - RNA, 19 nt, Artificial Sequence
  Synthetic
gaagcauacuccaguguuu

SEQ ID NO: 13855 - RNA, 19 nt, Artificial Sequence
  Synthetic
ccaggcagcucaaugauua

SEQ ID NO: 13856 - RNA, 19 nt, Artificial Sequence
  Synthetic
gcgagaacaugguggugaa

SEQ ID NO: 13857 - RNA, 19 nt, Artificial Sequence
  Synthetic
ggaguaaaccacagaaaga

SEQ ID NO: 13858 - RNA, 19 nt, Artificial Sequence
  Synthetic
ccaucagugucuuggauaa

SEQ ID NO: 13859 - RNA, 19 nt, Artificial Sequence
  Synthetic
caguaaagaugcucaaaga

SEQ ID NO: 13860 - RNA, 19 nt, Artificial Sequence
  Synthetic
gcaaaagaauggcugguaa

SEQ ID NO: 13861 - RNA, 19 nt, Artificial Sequence
  Synthetic
ugugaaagaccgagugauu

SEQ ID NO: 13862 - RNA, 19 nt, Artificial Sequence
  Synthetic
ggaagaugcaggacaguau

SEQ ID NO: 13863 - RNA, 19 nt, Artificial Sequence
  Synthetic
agacagugaugauggcauu

SEQ ID NO: 13864 - RNA, 19 nt, Artificial Sequence
  Synthetic
ccugagauuuccuggacua

SEQ ID NO: 13865 - RNA, 19 nt, Artificial Sequence
  Synthetic
agaaagauaacaaaggcua

SEQ ID NO: 13866 - RNA, 19 nt, Artificial Sequence
  Synthetic
aguaaaccacagaaagaua

SEQ ID NO: 13867 - RNA, 19 nt, Artificial Sequence
  Synthetic
gaagaagccucggcagaua

SEQ ID NO: 13868 - RNA, 19 nt, Artificial Sequence
  Synthetic
agaacaugguggugaaaau

SEQ ID NO: 13869 - RNA, 19 nt, Artificial Sequence
  Synthetic
ugagagagcucgucaacau

SEQ ID NO: 13870 - RNA, 19 nt, Artificial Sequence
  Synthetic
cuacaaagcuaaugaaaac

SEQ ID NO: 13871 - RNA, 19 nt, Artificial Sequence
  Synthetic
guaaugcaguccuggcaaa

SEQ ID NO: 13872 - RNA, 19 nt, Artificial Sequence
  Synthetic
ggaaugaacugaaaguagu

SEQ ID NO: 13873 - RNA, 19 nt, Artificial Sequence
  Synthetic
uggugaagcuggaaguuga

SEQ ID NO: 13874 - RNA, 19 nt, Artificial Sequence
  Synthetic
gcagacuacuacaaagcua

SEQ ID NO: 13875 - RNA, 19 nt, Artificial Sequence
  Synthetic
ucacuaugguggcaguaaa

SEQ ID NO: 13876 - RNA, 19 nt, Artificial Sequence
  Synthetic
uaaagaugcucaaagaaga

SEQ ID NO: 13877 - RNA, 19 nt, Artificial Sequence
  Synthetic
ugaaagaccgagugauuga

SEQ ID NO: 13878 - RNA, 19 nt, Artificial Sequence
  Synthetic
aagugaagaugaaaccuaa

SEQ ID NO: 13879 - RNA, 19 nt, Artificial Sequence
  Synthetic
ggaaggguguuucaagcaa

SEQ ID NO: 13880 - RNA, 19 nt, Artificial Sequence
  Synthetic
ugaggaggcccaagagcua

SEQ ID NO: 13881 - RNA, 19 nt, Artificial Sequence
  Synthetic
cagcauagcagaauggagu

SEQ ID NO: 13882 - RNA, 19 nt, Artificial Sequence
  Synthetic
ugucuuggauaaagggaga

SEQ ID NO: 13883 - RNA, 19 nt, Artificial Sequence
  Synthetic
aagaagaagccucggcaga

SEQ ID NO: 13884 - RNA, 19 nt, Artificial Sequence
  Synthetic
ccaaaguggugaagcugga

SEQ ID NO: 13885 - RNA, 19 nt, Artificial Sequence
  Synthetic
caucggagagggagcguuu

SEQ ID NO: 13886 - RNA, 19 nt, Artificial Sequence
  Synthetic
gagaagaagcugacaggca

SEQ ID NO: 13887 - RNA, 19 nt, Artificial Sequence
  Synthetic
ggaccauggccucggagaa

SEQ ID NO: 13888 - RNA, 19 nt, Artificial Sequence
  Synthetic
uggugagcgcugagaagaa

SEQ ID NO: 13889 - RNA, 19 nt, Artificial Sequence
  Synthetic
caacagccgucaucagcaa

SEQ ID NO: 13890 - RNA, 19 nt, Artificial Sequence
  Synthetic
cagcugaccaugaaggaca

SEQ ID NO: 13891 - RNA, 19 nt, Artificial Sequence
  Synthetic
ucuacggcguggagaguga

SEQ ID NO: 13892 - RNA, 19 nt, Artificial Sequence
  Synthetic
ugaccaugaaggacagcaa

SEQ ID NO: 13893 - RNA, 19 nt, Artificial Sequence
  Synthetic
cggaggaacucacgggaug

SEQ ID NO: 13894 - RNA, 19 nt, Artificial Sequence
  Synthetic
ggacagcaucgcucggcaa

SEQ ID NO: 13895 - RNA, 19 nt, Artificial Sequence
  Synthetic
cgacacuguggcugaguuu

SEQ ID NO: 13896 - RNA, 19 nt, Artificial Sequence
  Synthetic
cggucaacaucgcggucau

SEQ ID NO: 13897 - RNA, 19 nt, Artificial Sequence
  Synthetic
uggaguggcagaugggaga

SEQ ID NO: 13898 - RNA, 19 nt, Artificial Sequence
  Synthetic
uggcaucggugaacaacuu

SEQ ID NO: 13899 - RNA, 19 nt, Artificial Sequence
  Synthetic
ggagcuagggagcggaugu

SEQ ID NO: 13900 - RNA, 19 nt, Artificial Sequence
  Synthetic
ccaccugccucgacaccuu

SEQ ID NO: 13901 - RNA, 19 nt, Artificial Sequence
  Synthetic
gggcaagcgcgaugaagag

SEQ ID NO: 13902 - RNA, 19 nt, Artificial Sequence
  Synthetic
gcucgaauggagacacguu

SEQ ID NO: 13903 - RNA, 19 nt, Artificial Sequence
  Synthetic
ggaccggauuuggcugaau

SEQ ID NO: 13904 - RNA, 19 nt, Artificial Sequence
  Synthetic
acaucgcggucaucaagua

SEQ ID NO: 13905 - RNA, 19 nt, Artificial Sequence
  Synthetic
gggcugaagggcuuucuca

SEQ ID NO: 13906 - RNA, 19 nt, Artificial Sequence
  Synthetic
ucgcccagcugaccaugaa

SEQ ID NO: 13907 - RNA, 19 nt, Artificial Sequence
  Synthetic
ugaaggacagcaaccaguu

SEQ ID NO: 13908 - RNA, 19 nt, Artificial Sequence
  Synthetic
gcaccaggaccaguuaaaa

SEQ ID NO: 13909 - RNA, 19 nt, Artificial Sequence
  Synthetic
gaccauggccucggagaag

SEQ ID NO: 13910 - RNA, 19 nt, Artificial Sequence
  Synthetic
gagucacacuggccugaac

SEQ ID NO: 13911 - RNA, 19 nt, Artificial Sequence
  Synthetic
ggucaaauacaucauuguc

SEQ ID NO: 13912 - RNA, 19 nt, Artificial Sequence
  Synthetic
gagcugguucugcccauca

SEQ ID NO: 13913 - RNA, 19 nt, Artificial Sequence
  Synthetic
gcacguggcaucggugaac

SEQ ID NO: 13914 - RNA, 19 nt, Artificial Sequence
  Synthetic
ggugagcgcugagaagaag

SEQ ID NO: 13915 - RNA, 19 nt, Artificial Sequence
  Synthetic
gcccaucucuuaccucaau

SEQ ID NO: 13916 - RNA, 19 nt, Artificial Sequence
  Synthetic
ccucagagcaaguggagaa

SEQ ID NO: 13917 - RNA, 19 nt, Artificial Sequence
  Synthetic
gggaagauuucauccuuaa

SEQ ID NO: 13918 - RNA, 19 nt, Artificial Sequence
  Synthetic
gagcaaguggagaagcuaa

SEQ ID NO: 13919 - RNA, 19 nt, Artificial Sequence
  Synthetic
ccugagagguuuguggaaa

SEQ ID NO: 13920 - RNA, 19 nt, Artificial Sequence
  Synthetic
uggaagagcucauugacau

SEQ ID NO: 13921 - RNA, 19 nt, Artificial Sequence
  Synthetic
gcaguguggccuugguuua

SEQ ID NO: 13922 - RNA, 19 nt, Artificial Sequence
  Synthetic
cggugggccugguuaaaua

SEQ ID NO: 13923 - RNA, 19 nt, Artificial Sequence
  Synthetic
gagaacaugccgugguaca

SEQ ID NO: 13924 - RNA, 19 nt, Artificial Sequence
  Synthetic
ggaaaguggaccucagcuu

SEQ ID NO: 13925 - RNA, 19 nt, Artificial Sequence
  Synthetic
aggaggauuuggagcuaau

SEQ ID NO: 13926 - RNA, 19 nt, Artificial Sequence
  Synthetic
ggcuuugacugcuuggaaa

SEQ ID NO: 13927 - RNA, 19 nt, Artificial Sequence
  Synthetic
agucauccuucauggagaa

SEQ ID NO: 13928 - RNA, 19 nt, Artificial Sequence
  Synthetic
uggagaagcuaaaggaggu

SEQ ID NO: 13929 - RNA, 19 nt, Artificial Sequence
  Synthetic
gaaacaggcugcucaaguu

SEQ ID NO: 13930 - RNA, 19 nt, Artificial Sequence
  Synthetic
agggaagauuucauccuua

SEQ ID NO: 13931 - RNA, 19 nt, Artificial Sequence
  Synthetic
acacaagcuuucuggagca

SEQ ID NO: 13932 - RNA, 19 nt, Artificial Sequence
  Synthetic
uccuugaacuugagaacau

SEQ ID NO: 13933 - RNA, 19 nt, Artificial Sequence
  Synthetic
agcaaguggagaagcuaaa

SEQ ID NO: 13934 - RNA, 19 nt, Artificial Sequence
  Synthetic
cauccuucauggagaacau

SEQ ID NO: 13935 - RNA, 19 nt, Artificial Sequence
  Synthetic
gcucaaguucccagagauc

SEQ ID NO: 13936 - RNA, 19 nt, Artificial Sequence
  Synthetic
gaaaguggaccucagcuua

SEQ ID NO: 13937 - RNA, 19 nt, Artificial Sequence
  Synthetic
acaccaaagucccucgcaa

SEQ ID NO: 13938 - RNA, 19 nt, Artificial Sequence
  Synthetic
cuaauuaacaagugggccu

SEQ ID NO: 13939 - RNA, 19 nt, Artificial Sequence
  Synthetic
uaaaggagguugcaggcuu

SEQ ID NO: 13940 - RNA, 19 nt, Artificial Sequence
  Synthetic
caaggaggauuuggagcua

SEQ ID NO: 13941 - RNA, 19 nt, Artificial Sequence
  Synthetic
cgugguacauggcaaggua

SEQ ID NO: 13942 - RNA, 19 nt, Artificial Sequence
  Synthetic
uggagaacaugccguggua

SEQ ID NO: 13943 - RNA, 19 nt, Artificial Sequence
  Synthetic
aggauuuggagcuaauuaa

SEQ ID NO: 13944 - RNA, 19 nt, Artificial Sequence
  Synthetic
accaaagucccucgcaaua

SEQ ID NO: 13945 - RNA, 19 nt, Artificial Sequence
  Synthetic
cagagcaaguggagaagcu

SEQ ID NO: 13946 - RNA, 19 nt, Artificial Sequence
  Synthetic
aagaagaacucaagaaaga

SEQ ID NO: 13947 - RNA, 19 nt, Artificial Sequence
  Synthetic
guacauggcaagaaggaaa

SEQ ID NO: 13948 - RNA, 19 nt, Artificial Sequence
  Synthetic
agaaagacguuaagaauga

SEQ ID NO: 13949 - RNA, 19 nt, Artificial Sequence
  Synthetic
ggaagaagagugaaacaaa

SEQ ID NO: 13950 - RNA, 19 nt, Artificial Sequence
  Synthetic
gccaagauguugugagcaa

SEQ ID NO: 13951 - RNA, 19 nt, Artificial Sequence
  Synthetic
ggaaaagccucauguaaaa

SEQ ID NO: 13952 - RNA, 19 nt, Artificial Sequence
  Synthetic
gaaauuaccagcagagaau

SEQ ID NO: 13953 - RNA, 19 nt, Artificial Sequence
  Synthetic
ucaccuggcucaagggaaa

SEQ ID NO: 13954 - RNA, 19 nt, Artificial Sequence
  Synthetic
gggaacugcucuuuaauua

SEQ ID NO: 13955 - RNA, 19 nt, Artificial Sequence
  Synthetic
cugaagagccgaaggauga

SEQ ID NO: 13956 - RNA, 19 nt, Artificial Sequence
  Synthetic
gcaaagaagaacucaagaa

SEQ ID NO: 13957 - RNA, 19 nt, Artificial Sequence
  Synthetic
caagaaagacguuaagaau

SEQ ID NO: 13958 - RNA, 19 nt, Artificial Sequence
  Synthetic
ugaaacaaagccagagaaa

SEQ ID NO: 13959 - RNA, 19 nt, Artificial Sequence
  Synthetic
acugcaagauugaaggaua

SEQ ID NO: 13960 - RNA, 19 nt, Artificial Sequence
  Synthetic
gcauugagguuuaugaaga

SEQ ID NO: 13961 - RNA, 19 nt, Artificial Sequence
  Synthetic
ggaggaaggugaaggggaa

SEQ ID NO: 13962 - RNA, 19 nt, Artificial Sequence
  Synthetic
caaagaagaacucaagaaa

SEQ ID NO: 13963 - RNA, 19 nt, Artificial Sequence
  Synthetic
gggaagugcugcuagauuu

SEQ ID NO: 13964 - RNA, 19 nt, Artificial Sequence
  Synthetic
ugucaacagucuuggagaa

SEQ ID NO: 13965 - RNA, 19 nt, Artificial Sequence
  Synthetic
acacacugcugguggagaa

SEQ ID NO: 13966 - RNA, 19 nt, Artificial Sequence
  Synthetic
gcaugcagguucuggaaau

SEQ ID NO: 13967 - RNA, 19 nt, Artificial Sequence
  Synthetic
ggaagaggaagaagaguga

SEQ ID NO: 13968 - RNA, 19 nt, Artificial Sequence
  Synthetic
agaaggagcccgagguuga

SEQ ID NO: 13969 - RNA, 19 nt, Artificial Sequence
  Synthetic
ggagacaacgauaacgaaa

SEQ ID NO: 13970 - RNA, 19 nt, Artificial Sequence
  Synthetic
aggaaaagccucauguaaa

SEQ ID NO: 13971 - RNA, 19 nt, Artificial Sequence
  Synthetic
gcaaucugcugaagaaaga

SEQ ID NO: 13972 - RNA, 19 nt, Artificial Sequence
  Synthetic
ggaucaagcucaucgacuu

SEQ ID NO: 13973 - RNA, 19 nt, Artificial Sequence
  Synthetic
gggaaggggaagaggaaga

SEQ ID NO: 13974 - RNA, 19 nt, Artificial Sequence
  Synthetic
uggcaaagcccucugcaaa

SEQ ID NO: 13975 - RNA, 19 nt, Artificial Sequence
  Synthetic
ggaaagaggugaccaaugu

SEQ ID NO: 13976 - RNA, 19 nt, Artificial Sequence
  Synthetic
gaaggaagugggagagaaa

SEQ ID NO: 13977 - RNA, 19 nt, Artificial Sequence
  Synthetic
acgagaagcugaaggugaa

SEQ ID NO: 13978 - RNA, 19 nt, Artificial Sequence
  Synthetic
gagcaggcuuugugagaga

SEQ ID NO: 13979 - RNA, 19 nt, Artificial Sequence
  Synthetic
ggauuguggaugaggacua

SEQ ID NO: 13980 - RNA, 19 nt, Artificial Sequence
  Synthetic
cugagaagcugcuggccaa

SEQ ID NO: 13981 - RNA, 19 nt, Artificial Sequence
  Synthetic
cagaagaaggaaagaacau

SEQ ID NO: 13982 - RNA, 19 nt, Artificial Sequence
  Synthetic
gaaagaacauccuggcaga

SEQ ID NO: 13983 - RNA, 19 nt, Artificial Sequence
  Synthetic
cagccaaggucaucaagaa

SEQ ID NO: 13984 - RNA, 19 nt, Artificial Sequence
  Synthetic
gcuugugccuuguaaauaa

SEQ ID NO: 13985 - RNA, 19 nt, Artificial Sequence
  Synthetic
gcucggagguggcaaguuu

SEQ ID NO: 13986 - RNA, 19 nt, Artificial Sequence
  Synthetic
gggaaugucagcagugaau

SEQ ID NO: 13987 - RNA, 19 nt, Artificial Sequence
  Synthetic
acacagagacccuaaacaa

SEQ ID NO: 13988 - RNA, 19 nt, Artificial Sequence
  Synthetic
ucaacaaccuggcggagaa

SEQ ID NO: 13989 - RNA, 19 nt, Artificial Sequence
  Synthetic
augaagaggcgcuggaaga

SEQ ID NO: 13990 - RNA, 19 nt, Artificial Sequence
  Synthetic
gccagaaggaagugggaga

SEQ ID NO: 13991 - RNA, 19 nt, Artificial Sequence
  Synthetic
ggugaagaucauugacuuu

SEQ ID NO: 13992 - RNA, 19 nt, Artificial Sequence
  Synthetic
ucgagaggauuguggauga

SEQ ID NO: 13993 - RNA, 19 nt, Artificial Sequence
  Synthetic
agacagacauguggaguau

SEQ ID NO: 13994 - RNA, 19 nt, Artificial Sequence
  Synthetic
augcacaagaugaggguuu

SEQ ID NO: 13995 - RNA, 19 nt, Artificial Sequence
  Synthetic
gagcaguugagcugggaau

SEQ ID NO: 13996 - RNA, 19 nt, Artificial Sequence
  Synthetic
agauugaggucaugaacca

SEQ ID NO: 13997 - RNA, 19 nt, Artificial Sequence
  Synthetic
ccaaggucaucaagaaaca

SEQ ID NO: 13998 - RNA, 19 nt, Artificial Sequence
  Synthetic
ccguaucagacgaggccaa

SEQ ID NO: 13999 - RNA, 19 nt, Artificial Sequence
  Synthetic
gcagagagccagaaggaag

SEQ ID NO: 14000 - RNA, 19 nt, Artificial Sequence
  Synthetic
aagaaauaccucaugaaga

SEQ ID NO: 14001 - RNA, 19 nt, Artificial Sequence
  Synthetic
aagacagacauguggagua

SEQ ID NO: 14002 - RNA, 19 nt, Artificial Sequence
  Synthetic
ccugaagaaagaugccaaa

SEQ ID NO: 14003 - RNA, 19 nt, Artificial Sequence
  Synthetic
aggaaaugguguugcugga

SEQ ID NO: 14004 - RNA, 19 nt, Artificial Sequence
  Synthetic
gggcauuuggugaagauca

SEQ ID NO: 14005 - RNA, 19 nt, Artificial Sequence
  Synthetic
ugguguugcuggagauuga

SEQ ID NO: 14006 - RNA, 19 nt, Artificial Sequence
  Synthetic
caaaggaacuuaugggaaa

SEQ ID NO: 14007 - RNA, 19 nt, Artificial Sequence
  Synthetic
caacagaaguagcaagaaa

SEQ ID NO: 14008 - RNA, 19 nt, Artificial Sequence
  Synthetic
ggaaagacagucagggaaa

SEQ ID NO: 14009 - RNA, 19 nt, Artificial Sequence
  Synthetic
gaacauagcccuaguuuaa

SEQ ID NO: 14010 - RNA, 19 nt, Artificial Sequence
  Synthetic
cagcauaucuagaaaggaa

SEQ ID NO: 14011 - RNA, 19 nt, Artificial Sequence
  Synthetic
ggucagauucuaugggaua

SEQ ID NO: 14012 - RNA, 19 nt, Artificial Sequence
  Synthetic
ccacaaaacaugaggaaau

SEQ ID NO: 14013 - RNA, 19 nt, Artificial Sequence
  Synthetic
gaacagcaaucuaaggaaa

SEQ ID NO: 14014 - RNA, 19 nt, Artificial Sequence
  Synthetic
aggaagagguuaagcaaga

SEQ ID NO: 14015 - RNA, 19 nt, Artificial Sequence
  Synthetic
ucaaagaccuggaagagaa

SEQ ID NO: 14016 - RNA, 19 nt, Artificial Sequence
  Synthetic
ggauauacuuuaagaagga

SEQ ID NO: 14017 - RNA, 19 nt, Artificial Sequence
  Synthetic
cgauauugacgaagagauu

SEQ ID NO: 14018 - RNA, 19 nt, Artificial Sequence
  Synthetic
guaaaggagaggagccaaa

SEQ ID NO: 14019 - RNA, 19 nt, Artificial Sequence
  Synthetic
guacaagacaucaugaaua

SEQ ID NO: 14020 - RNA, 19 nt, Artificial Sequence
  Synthetic
gagugaaacuaguagauuu

SEQ ID NO: 14021 - RNA, 19 nt, Artificial Sequence
  Synthetic
caaaugaggacuucagaaa

SEQ ID NO: 14022 - RNA, 19 nt, Artificial Sequence
  Synthetic
cgguauucauucagagcaa

SEQ ID NO: 14023 - RNA, 19 nt, Artificial Sequence
  Synthetic
gguagaagccuuuggcaau

SEQ ID NO: 14024 - RNA, 19 nt, Artificial Sequence
  Synthetic
gggaaaucacugagacaau

SEQ ID NO: 14025 - RNA, 19 nt, Artificial Sequence
  Synthetic
aagcuaugauccagaguua

SEQ ID NO: 14026 - RNA, 19 nt, Artificial Sequence
  Synthetic
ccaaugcuguggagaguaa

SEQ ID NO: 14027 - RNA, 19 nt, Artificial Sequence
  Synthetic
gaaagaaagcgcuauaaua

SEQ ID NO: 14028 - RNA, 19 nt, Artificial Sequence
  Synthetic
uaaggaaaguggagaaaga

SEQ ID NO: 14029 - RNA, 19 nt, Artificial Sequence
  Synthetic
agaaggaggaggagagaga

SEQ ID NO: 14030 - RNA, 19 nt, Artificial Sequence
  Synthetic
acaucaagaagaaggauaa

SEQ ID NO: 14031 - RNA, 19 nt, Artificial Sequence
  Synthetic
gaauacagucucagagcaa

SEQ ID NO: 14032 - RNA, 19 nt, Artificial Sequence
  Synthetic
cugaauaucuccuggaaaa

SEQ ID NO: 14033 - RNA, 19 nt, Artificial Sequence
  Synthetic
gaaagcaacuucagaaaga

SEQ ID NO: 14034 - RNA, 19 nt, Artificial Sequence
  Synthetic
uguaugaggaagagguuaa

SEQ ID NO: 14035 - RNA, 19 nt, Artificial Sequence
  Synthetic
cgaagagauugaagcagaa

SEQ ID NO: 14036 - RNA, 19 nt, Artificial Sequence
  Synthetic
aaucagaccuugagagaga

SEQ ID NO: 14037 - RNA, 19 nt, Artificial Sequence
  Synthetic
gggcaagaaucucugaaua

SEQ ID NO: 14038 - RNA, 19 nt, Artificial Sequence
  Synthetic
gagaauacauggagaaacu

SEQ ID NO: 14039 - RNA, 19 nt, Artificial Sequence
  Synthetic
guacauagcugaugaaacu

SEQ ID NO: 14040 - RNA, 19 nt, Artificial Sequence
  Synthetic
cagacaagagcuaggauaa

SEQ ID NO: 14041 - RNA, 19 nt, Artificial Sequence
  Synthetic
augaagaaauugaggcaga

SEQ ID NO: 14042 - RNA, 19 nt, Artificial Sequence
  Synthetic
guagauaguaugcaagaaa

SEQ ID NO: 14043 - RNA, 19 nt, Artificial Sequence
  Synthetic
ggcaaagucuacaagguaa

SEQ ID NO: 14044 - RNA, 19 nt, Artificial Sequence
  Synthetic
gggaaauuauagagaccau

SEQ ID NO: 14045 - RNA, 19 nt, Artificial Sequence
  Synthetic
gcauaaacaucgccaauga

SEQ ID NO: 14046 - RNA, 19 nt, Artificial Sequence
  Synthetic
ugacaugcauccugugaaa

SEQ ID NO: 14047 - RNA, 19 nt, Artificial Sequence
  Synthetic
cggaggaaauuuaagaaaa

SEQ ID NO: 14048 - RNA, 19 nt, Artificial Sequence
  Synthetic
uuaaaggaguacauggaaa

SEQ ID NO: 14049 - RNA, 19 nt, Artificial Sequence
  Synthetic
ccguggaauaugaggacaa

SEQ ID NO: 14050 - RNA, 19 nt, Artificial Sequence
  Synthetic
ggaaugagagggaaaguuu

SEQ ID NO: 14051 - RNA, 19 nt, Artificial Sequence
  Synthetic
gaguuaagcucguugacuu

SEQ ID NO: 14052 - RNA, 19 nt, Artificial Sequence
  Synthetic
agucauaggcagagugguu

SEQ ID NO: 14053 - RNA, 19 nt, Artificial Sequence
  Synthetic
ggcaagaaucucugaauau

SEQ ID NO: 14054 - RNA, 19 nt, Artificial Sequence
  Synthetic
ggacauguuccuccagaaa

SEQ ID NO: 14055 - RNA, 19 nt, Artificial Sequence
  Synthetic
gaaaugauguuuacaccaa

SEQ ID NO: 14056 - RNA, 19 nt, Artificial Sequence
  Synthetic
gaagacaauucgaagcaau

SEQ ID NO: 14057 - RNA, 19 nt, Artificial Sequence
  Synthetic
guaggaacauucaugguaa

SEQ ID NO: 14058 - RNA, 19 nt, Artificial Sequence
  Synthetic
gagcaaauccaguacuauu

SEQ ID NO: 14059 - RNA, 19 nt, Artificial Sequence
  Synthetic
gugauauggaugaagaaau

SEQ ID NO: 14060 - RNA, 19 nt, Artificial Sequence
  Synthetic
aaacauauguagugcagga

SEQ ID NO: 14061 - RNA, 19 nt, Artificial Sequence
  Synthetic
ccagacaagagcuaggaua

SEQ ID NO: 14062 - RNA, 19 nt, Artificial Sequence
  Synthetic
ggaugaagaaauugaggca

SEQ ID NO: 14063 - RNA, 19 nt, Artificial Sequence
  Synthetic
ugaaacaucuguauggauu

SEQ ID NO: 14064 - RNA, 19 nt, Artificial Sequence
  Synthetic
gaggguauaucuagugaau

SEQ ID NO: 14065 - RNA, 19 nt, Artificial Sequence
  Synthetic
gaacagggccaaacggaaa

SEQ ID NO: 14066 - RNA, 19 nt, Artificial Sequence
  Synthetic
guauagggacuuugauaaa

SEQ ID NO: 14067 - RNA, 19 nt, Artificial Sequence
  Synthetic
gcagauggacugagcacaa

SEQ ID NO: 14068 - RNA, 19 nt, Artificial Sequence
  Synthetic
gcagagagauccaggcuca

SEQ ID NO: 14069 - RNA, 19 nt, Artificial Sequence
  Synthetic
cggucuuguuccagggcaa

SEQ ID NO: 14070 - RNA, 19 nt, Artificial Sequence
  Synthetic
agugaaagcuacuuaauca

SEQ ID NO: 14071 - RNA, 19 nt, Artificial Sequence
  Synthetic
ggaucaaugagauggugaa

SEQ ID NO: 14072 - RNA, 19 nt, Artificial Sequence
  Synthetic
acaaguguguggagaggau

SEQ ID NO: 14073 - RNA, 19 nt, Artificial Sequence
  Synthetic
cuguauagggacuuugaua

SEQ ID NO: 14074 - RNA, 19 nt, Artificial Sequence
  Synthetic
gccagaucggcuagggaua

SEQ ID NO: 14075 - RNA, 19 nt, Artificial Sequence
  Synthetic
uguauagggacuuugauaa

SEQ ID NO: 14076 - RNA, 19 nt, Artificial Sequence
  Synthetic
caguguugcccgagauuga

SEQ ID NO: 14077 - RNA, 19 nt, Artificial Sequence
  Synthetic
uggcagaagcagauggacu

SEQ ID NO: 14078 - RNA, 19 nt, Artificial Sequence
  Synthetic
gcugggagcugcugaagga

SEQ ID NO: 14079 - RNA, 19 nt, Artificial Sequence
  Synthetic
acacugggucugaaaggaa

SEQ ID NO: 14080 - RNA, 19 nt, Artificial Sequence
  Synthetic
augcagguuugcuggguuu

SEQ ID NO: 14081 - RNA, 19 nt, Artificial Sequence
  Synthetic
gggagaugcugggcagaca

SEQ ID NO: 14082 - RNA, 19 nt, Artificial Sequence
  Synthetic
guggagaggaucaaugaga

SEQ ID NO: 14083 - RNA, 19 nt, Artificial Sequence
  Synthetic
cugaugaagcugaggcacu

SEQ ID NO: 14084 - RNA, 19 nt, Artificial Sequence
  Synthetic
ggagaggaucaaugagaug

SEQ ID NO: 14085 - RNA, 19 nt, Artificial Sequence
  Synthetic
ugaacagggccaaacggaa

SEQ ID NO: 14086 - RNA, 19 nt, Artificial Sequence
  Synthetic
ucaaugagauggugaacag

SEQ ID NO: 14087 - RNA, 19 nt, Artificial Sequence
  Synthetic
augggaagauccuggcaga

SEQ ID NO: 14088 - RNA, 19 nt, Artificial Sequence
  Synthetic
ugauaucggcuacgucaaa

SEQ ID NO: 14089 - RNA, 19 nt, Artificial Sequence
  Synthetic
gcacaaaccacuggcugau

SEQ ID NO: 14090 - RNA, 19 nt, Artificial Sequence
  Synthetic
gggcagacacaucguagca

SEQ ID NO: 14091 - RNA, 19 nt, Artificial Sequence
  Synthetic
guguuugacuccauugaca

SEQ ID NO: 14092 - RNA, 19 nt, Artificial Sequence
  Synthetic
uggagaggaucaaugagau

SEQ ID NO: 14093 - RNA, 19 nt, Artificial Sequence
  Synthetic
gauccuggcagaagcagau

SEQ ID NO: 14094 - RNA, 19 nt, Artificial Sequence
  Synthetic
cagauggacugagcacaaa

SEQ ID NO: 14095 - RNA, 19 nt, Artificial Sequence
  Synthetic
gucauaagguccugaguaa

SEQ ID NO: 14096 - RNA, 19 nt, Artificial Sequence
  Synthetic
ucaagaacgccgagcgaau

SEQ ID NO: 14097 - RNA, 19 nt, Artificial Sequence
  Synthetic
ucacugagcucuuuagcaa

SEQ ID NO: 14098 - RNA, 19 nt, Artificial Sequence
  Synthetic
gcugcaaggugcugguaga

SEQ ID NO: 14099 - RNA, 19 nt, Artificial Sequence
  Synthetic
gcaagaagcucagggacga

SEQ ID NO: 14100 - RNA, 19 nt, Artificial Sequence
  Synthetic
ggccagaugcugugggagu

SEQ ID NO: 14101 - RNA, 19 nt, Artificial Sequence
  Synthetic
uggacgaggaggugcucaa

SEQ ID NO: 14102 - RNA, 19 nt, Artificial Sequence
  Synthetic
agucauaagguccugagua

SEQ ID NO: 14103 - RNA, 19 nt, Artificial Sequence
  Synthetic
caaaagaacggcagcagau

SEQ ID NO: 14104 - RNA, 19 nt, Artificial Sequence
  Synthetic
gccgagugggugagcacaa

SEQ ID NO: 14105 - RNA, 19 nt, Artificial Sequence
  Synthetic
ucaucgagguggacgagga

SEQ ID NO: 14106 - RNA, 19 nt, Artificial Sequence
  Synthetic
gguuuggccuggcugauau

SEQ ID NO: 14107 - RNA, 19 nt, Artificial Sequence
  Synthetic
ccaacaagcaguggaucuu

SEQ ID NO: 14108 - RNA, 19 nt, Artificial Sequence
  Synthetic
ccgagugggugagcacaaa

SEQ ID NO: 14109 - RNA, 19 nt, Artificial Sequence
  Synthetic
acugagcucuuuagcaaca

SEQ ID NO: 14110 - RNA, 19 nt, Artificial Sequence
  Synthetic
ccccguaccuggacaaauu

SEQ ID NO: 14111 - RNA, 19 nt, Artificial Sequence
  Synthetic
ccgggacccuguucaagaa

SEQ ID NO: 14112 - RNA, 19 nt, Artificial Sequence
  Synthetic
gauggcagcuucuccaaca

SEQ ID NO: 14113 - RNA, 19 nt, Artificial Sequence
  Synthetic
ggcgggaccuucagacacu

SEQ ID NO: 14114 - RNA, 19 nt, Artificial Sequence
  Synthetic
cauaagguccugaguaacg

SEQ ID NO: 14115 - RNA, 19 nt, Artificial Sequence
  Synthetic
gaacgccgagcgaaugcua

SEQ ID NO: 14116 - RNA, 19 nt, Artificial Sequence
  Synthetic
acgaggaggugcucaagug

SEQ ID NO: 14117 - RNA, 19 nt, Artificial Sequence
  Synthetic
guggaucuucuucugguuu

SEQ ID NO: 14118 - RNA, 19 nt, Artificial Sequence
  Synthetic
gggacugccagacuccuuu

SEQ ID NO: 14119 - RNA, 19 nt, Artificial Sequence
  Synthetic
gcugauggcugugguucug

SEQ ID NO: 14120 - RNA, 19 nt, Artificial Sequence
  Synthetic
caucaaucccugguacuuc

SEQ ID NO: 14121 - RNA, 19 nt, Artificial Sequence
  Synthetic
guacuucaaacacagugau

SEQ ID NO: 14122 - RNA, 19 nt, Artificial Sequence
  Synthetic
uagacgcgcuucgacacaa

SEQ ID NO: 14123 - RNA, 19 nt, Artificial Sequence
  Synthetic
uggaucuucuucugguuug

SEQ ID NO: 14124 - RNA, 19 nt, Artificial Sequence
  Synthetic
caagaacgccgagcgaaug

SEQ ID NO: 14125 - RNA, 19 nt, Artificial Sequence
  Synthetic
cuacagagcuccugaaauu

SEQ ID NO: 14126 - RNA, 19 nt, Artificial Sequence
  Synthetic
ggauaaugcuguaccaauu

SEQ ID NO: 14127 - RNA, 19 nt, Artificial Sequence
  Synthetic
gugaggaaguugacagcaa

SEQ ID NO: 14128 - RNA, 19 nt, Artificial Sequence
  Synthetic
ccaaggaaauuguggcuau

SEQ ID NO: 14129 - RNA, 19 nt, Artificial Sequence
  Synthetic
gagcagaacuuauaugauu

SEQ ID NO: 14130 - RNA, 19 nt, Artificial Sequence
  Synthetic
gcuaugaagucuuggaguu

SEQ ID NO: 14131 - RNA, 19 nt, Artificial Sequence
  Synthetic
ugaaaaugcugaugaguau

SEQ ID NO: 14132 - RNA, 19 nt, Artificial Sequence
  Synthetic
ugaugaagcucaagagucu

SEQ ID NO: 14133 - RNA, 19 nt, Artificial Sequence
  Synthetic
aggaaauuguggcuauuaa

SEQ ID NO: 14134 - RNA, 19 nt, Artificial Sequence
  Synthetic
ggaaauuguggcuauuaaa

SEQ ID NO: 14135 - RNA, 19 nt, Artificial Sequence
  Synthetic
cgaagaaacugaaaauaga

SEQ ID NO: 14136 - RNA, 19 nt, Artificial Sequence
  Synthetic
uuucuuugcuugagccaua

SEQ ID NO: 14137 - RNA, 19 nt, Artificial Sequence
  Synthetic
gaugcugaauaaagccaaa

SEQ ID NO: 14138 - RNA, 19 nt, Artificial Sequence
  Synthetic
gggcuguggcugagggaaa

SEQ ID NO: 14139 - RNA, 19 nt, Artificial Sequence
  Synthetic
ccucagacauacagagaau

SEQ ID NO: 14140 - RNA, 19 nt, Artificial Sequence
  Synthetic
gaacagauauucuccauaa

SEQ ID NO: 14141 - RNA, 19 nt, Artificial Sequence
  Synthetic
ggaauaagaagcagcugaa

SEQ ID NO: 14142 - RNA, 19 nt, Artificial Sequence
  Synthetic
gugaauuccugguggacau

SEQ ID NO: 14143 - RNA, 19 nt, Artificial Sequence
  Synthetic
auacagaacguguggaaca

SEQ ID NO: 14144 - RNA, 19 nt, Artificial Sequence
  Synthetic
ggugggaguagcagacaaa

SEQ ID NO: 14145 - RNA, 19 nt, Artificial Sequence
  Synthetic
agaaugaccuggaggaacu

SEQ ID NO: 14146 - RNA, 19 nt, Artificial Sequence
  Synthetic
cagaagucguguugacaga

SEQ ID NO: 14147 - RNA, 19 nt, Artificial Sequence
  Synthetic
gcccagagguccaagcuau

SEQ ID NO: 14148 - RNA, 19 nt, Artificial Sequence
  Synthetic
cguuugagguucuugauuu

SEQ ID NO: 14149 - RNA, 19 nt, Artificial Sequence
  Synthetic
ggcagcagcuuguggaaca

SEQ ID NO: 14150 - RNA, 19 nt, Artificial Sequence
  Synthetic
gguggaggccuuuggaaca

SEQ ID NO: 14151 - RNA, 19 nt, Artificial Sequence
  Synthetic
gcuccaaccuuauacagaa

SEQ ID NO: 14152 - RNA, 19 nt, Artificial Sequence
  Synthetic
cagaauuaaaggugaaugu

SEQ ID NO: 14153 - RNA, 19 nt, Artificial Sequence
  Synthetic
guguggaacaucugaguga

SEQ ID NO: 14154 - RNA, 19 nt, Artificial Sequence
  Synthetic
acacugaggaugugguuca

SEQ ID NO: 14155 - RNA, 19 nt, Artificial Sequence
  Synthetic
aauaagaagcagcugaaga

SEQ ID NO: 14156 - RNA, 19 nt, Artificial Sequence
  Synthetic
ggaaagcguguguguguga

SEQ ID NO: 14157 - RNA, 19 nt, Artificial Sequence
  Synthetic
ugaagauacucacggacau

SEQ ID NO: 14158 - RNA, 19 nt, Artificial Sequence
  Synthetic
auaagaagcagcugaagau

SEQ ID NO: 14159 - RNA, 19 nt, Artificial Sequence
  Synthetic
gaauaaagcucgagccgaa

SEQ ID NO: 14160 - RNA, 19 nt, Artificial Sequence
  Synthetic
caguaaagaaagagaagaa

SEQ ID NO: 14161 - RNA, 19 nt, Artificial Sequence
  Synthetic
aggaaagguuggaaagaau

SEQ ID NO: 14162 - RNA, 19 nt, Artificial Sequence
  Synthetic
agugaauacuggagaagaa

SEQ ID NO: 14163 - RNA, 19 nt, Artificial Sequence
  Synthetic
gcuaaauggaaaagagaaa

SEQ ID NO: 14164 - RNA, 19 nt, Artificial Sequence
  Synthetic
ggagaagaaaggaggaaaa

SEQ ID NO: 14165 - RNA, 19 nt, Artificial Sequence
  Synthetic
aagaacaacuagaacgaaa

SEQ ID NO: 14166 - RNA, 19 nt, Artificial Sequence
  Synthetic
caaacaaagaugagagcuu

SEQ ID NO: 14167 - RNA, 19 nt, Artificial Sequence
  Synthetic
gggaaaaguccgacagauu

SEQ ID NO: 14168 - RNA, 19 nt, Artificial Sequence
  Synthetic
cuuugagguuuaugagaaa

SEQ ID NO: 14169 - RNA, 19 nt, Artificial Sequence
  Synthetic
cuacaagagccaaguggaa

SEQ ID NO: 14170 - RNA, 19 nt, Artificial Sequence
  Synthetic
gcaacaaagagcagaagau

SEQ ID NO: 14171 - RNA, 19 nt, Artificial Sequence
  Synthetic
ugguggaaguggugaagua

SEQ ID NO: 14172 - RNA, 19 nt, Artificial Sequence
  Synthetic
ccgaaggacauaugguuua

SEQ ID NO: 14173 - RNA, 19 nt, Artificial Sequence
  Synthetic
gcuuauugcagaagaauuu

SEQ ID NO: 14174 - RNA, 19 nt, Artificial Sequence
  Synthetic
ccaacagauuaaagccaaa

SEQ ID NO: 14175 - RNA, 19 nt, Artificial Sequence
  Synthetic
cagaagauaaugaagcuaa

SEQ ID NO: 14176 - RNA, 19 nt, Artificial Sequence
  Synthetic
gagcuaaacaaguagaaga

SEQ ID NO: 14177 - RNA, 19 nt, Artificial Sequence
  Synthetic
gagccuaccaagaagauaa

SEQ ID NO: 14178 - RNA, 19 nt, Artificial Sequence
  Synthetic
ugaagaauacagugaagaa

SEQ ID NO: 14179 - RNA, 19 nt, Artificial Sequence
  Synthetic
gggaacaaggauggagaaa

SEQ ID NO: 14180 - RNA, 19 nt, Artificial Sequence
  Synthetic
gugaaaagaaagaagcuaa

SEQ ID NO: 14181 - RNA, 19 nt, Artificial Sequence
  Synthetic
cuggcaagacugaggcaaa

SEQ ID NO: 14182 - RNA, 19 nt, Artificial Sequence
  Synthetic
aacuagaacgaaagagaaa

SEQ ID NO: 14183 - RNA, 19 nt, Artificial Sequence
  Synthetic
gagagugaauacuggagaa

SEQ ID NO: 14184 - RNA, 19 nt, Artificial Sequence
  Synthetic
agccaaacuucguggugaa

SEQ ID NO: 14185 - RNA, 19 nt, Artificial Sequence
  Synthetic
cugaggaagcagcaagaaa

SEQ ID NO: 14186 - RNA, 19 nt, Artificial Sequence
  Synthetic
ggugaaauugcuagugaau

SEQ ID NO: 14187 - RNA, 19 nt, Artificial Sequence
  Synthetic
aacaaagagcagaagauaa

SEQ ID NO: 14188 - RNA, 19 nt, Artificial Sequence
  Synthetic
ggaagcagcaagaaagaga

SEQ ID NO: 14189 - RNA, 19 nt, Artificial Sequence
  Synthetic
ggaaauaucuguuggagaa

SEQ ID NO: 14190 - RNA, 19 nt, Artificial Sequence
  Synthetic
ggaagaagaaauagcguua

SEQ ID NO: 14191 - RNA, 19 nt, Artificial Sequence
  Synthetic
guuagaaagaccagagaaa

SEQ ID NO: 14192 - RNA, 19 nt, Artificial Sequence
  Synthetic
ggacagaaguauuugaaga

SEQ ID NO: 14193 - RNA, 19 nt, Artificial Sequence
  Synthetic
agaaauagcguuagaaaga

SEQ ID NO: 14194 - RNA, 19 nt, Artificial Sequence
  Synthetic
ccaaagaccuugauugcaa

SEQ ID NO: 14195 - RNA, 19 nt, Artificial Sequence
  Synthetic
gaacaagaauccuucauua

SEQ ID NO: 14196 - RNA, 19 nt, Artificial Sequence
  Synthetic
gaagaaauagcguuagaaa

SEQ ID NO: 14197 - RNA, 19 nt, Artificial Sequence
  Synthetic
uagaaagaccagagaaaga

SEQ ID NO: 14198 - RNA, 19 nt, Artificial Sequence
  Synthetic
gauacuucaucgagacuua

SEQ ID NO: 14199 - RNA, 19 nt, Artificial Sequence
  Synthetic
ugucagaaguacagaaaau

SEQ ID NO: 14200 - RNA, 19 nt, Artificial Sequence
  Synthetic
agccaaacgaggagaggaa

SEQ ID NO: 14201 - RNA, 19 nt, Artificial Sequence
  Synthetic
gccgagaucuggacgauaa

SEQ ID NO: 14202 - RNA, 19 nt, Artificial Sequence
  Synthetic
gcaaacgaaugcaagaauu

SEQ ID NO: 14203 - RNA, 19 nt, Artificial Sequence
  Synthetic
ccaaacgaggagaggaauu

SEQ ID NO: 14204 - RNA, 19 nt, Artificial Sequence
  Synthetic
agaaagaaaucaggaauga

SEQ ID NO: 14205 - RNA, 19 nt, Artificial Sequence
  Synthetic
ggaagaggaaucugaugaa

SEQ ID NO: 14206 - RNA, 19 nt, Artificial Sequence
  Synthetic
gggaaucagccaugcagaa

SEQ ID NO: 14207 - RNA, 19 nt, Artificial Sequence
  Synthetic
gaaggaggcugcucauaua

SEQ ID NO: 14208 - RNA, 19 nt, Artificial Sequence
  Synthetic
gggaagaggaaucugauga

SEQ ID NO: 14209 - RNA, 19 nt, Artificial Sequence
  Synthetic
ugaggaggaagaagaaaua

SEQ ID NO: 14210 - RNA, 19 nt, Artificial Sequence
  Synthetic
ccaggcggcugaugagaaa

SEQ ID NO: 14211 - RNA, 19 nt, Artificial Sequence
  Synthetic
aggaaauaucuguuggaga

SEQ ID NO: 14212 - RNA, 19 nt, Artificial Sequence
  Synthetic
aaaaugacgccaagagaaa

SEQ ID NO: 14213 - RNA, 19 nt, Artificial Sequence
  Synthetic
aagaagaaauagcguuaga

SEQ ID NO: 14214 - RNA, 19 nt, Artificial Sequence
  Synthetic
gcagcugaguguugaugua

SEQ ID NO: 14215 - RNA, 19 nt, Artificial Sequence
  Synthetic
gaagagagguggcaaggca

SEQ ID NO: 14216 - RNA, 19 nt, Artificial Sequence
  Synthetic
ggaagauauguguguauuu

SEQ ID NO: 14217 - RNA, 19 nt, Artificial Sequence
  Synthetic
agagaaaggaugcggcuga

SEQ ID NO: 14218 - RNA, 19 nt, Artificial Sequence
  Synthetic
gagaaagccaggaagcuga

SEQ ID NO: 14219 - RNA, 19 nt, Artificial Sequence
  Synthetic
gagaagagggcgacaauua

SEQ ID NO: 14220 - RNA, 19 nt, Artificial Sequence
  Synthetic
gaaagaacucgcugggaaa

SEQ ID NO: 14221 - RNA, 19 nt, Artificial Sequence
  Synthetic
ugacagaagcugagaaaca

SEQ ID NO: 14222 - RNA, 19 nt, Artificial Sequence
  Synthetic
gagcugaaacugaaggaaa

SEQ ID NO: 14223 - RNA, 19 nt, Artificial Sequence
  Synthetic
aagaaagauuggagcagaa

SEQ ID NO: 14224 - RNA, 19 nt, Artificial Sequence
  Synthetic
cagaagauccggaggaaga

SEQ ID NO: 14225 - RNA, 19 nt, Artificial Sequence
  Synthetic
ccucaguaauuaagaagaa

SEQ ID NO: 14226 - RNA, 19 nt, Artificial Sequence
  Synthetic
gcucaagcccugucagaua

SEQ ID NO: 14227 - RNA, 19 nt, Artificial Sequence
  Synthetic
agaaagaacucgcugggaa

SEQ ID NO: 14228 - RNA, 19 nt, Artificial Sequence
  Synthetic
gaagagugauggcaagaua

SEQ ID NO: 14229 - RNA, 19 nt, Artificial Sequence
  Synthetic
caaacuggcuagagcagaa

SEQ ID NO: 14230 - RNA, 19 nt, Artificial Sequence
  Synthetic
cgucaagcuuggagacuuu

SEQ ID NO: 14231 - RNA, 19 nt, Artificial Sequence
  Synthetic
ggaucuggcuaguguaauu

SEQ ID NO: 14232 - RNA, 19 nt, Artificial Sequence
  Synthetic
caucaugaggagugagaau

SEQ ID NO: 14233 - RNA, 19 nt, Artificial Sequence
  Synthetic
gggaaaguaaagagaacau

SEQ ID NO: 14234 - RNA, 19 nt, Artificial Sequence
  Synthetic
ccugucagauauugagaaa

SEQ ID NO: 14235 - RNA, 19 nt, Artificial Sequence
  Synthetic
aagcaagagaagaaagauu

SEQ ID NO: 14236 - RNA, 19 nt, Artificial Sequence
  Synthetic
acaaagggaaccaaggaaa

SEQ ID NO: 14237 - RNA, 19 nt, Artificial Sequence
  Synthetic
ggcaauacuuagaugaaga

SEQ ID NO: 14238 - RNA, 19 nt, Artificial Sequence
  Synthetic
gcuuggagacuuugggcua

SEQ ID NO: 14239 - RNA, 19 nt, Artificial Sequence
  Synthetic
gcuuuguguucgugagaga

SEQ ID NO: 14240 - RNA, 19 nt, Artificial Sequence
  Synthetic
caucuaaguccaagugcaa

SEQ ID NO: 14241 - RNA, 19 nt, Artificial Sequence
  Synthetic
caugacagaagcugagaaa

SEQ ID NO: 14242 - RNA, 19 nt, Artificial Sequence
  Synthetic
gugagaauucugagaguca

SEQ ID NO: 14243 - RNA, 19 nt, Artificial Sequence
  Synthetic
ggaggaagagugauggcaa

SEQ ID NO: 14244 - RNA, 19 nt, Artificial Sequence
  Synthetic
agcugaaacugaaggaaau

SEQ ID NO: 14245 - RNA, 19 nt, Artificial Sequence
  Synthetic
guucaaaucuguuagcuuu

SEQ ID NO: 14246 - RNA, 19 nt, Artificial Sequence
  Synthetic
uuacaugucuccugaacaa

SEQ ID NO: 14247 - RNA, 19 nt, Artificial Sequence
  Synthetic
gcaagauauuaguuuggaa

SEQ ID NO: 14248 - RNA, 19 nt, Artificial Sequence
  Synthetic
gcagacagauccugggcau

SEQ ID NO: 14249 - RNA, 19 nt, Artificial Sequence
  Synthetic
ccuaaagguuugagaauua

SEQ ID NO: 14250 - RNA, 19 nt, Artificial Sequence
  Synthetic
gggagaagguauaguggaa

SEQ ID NO: 14251 - RNA, 19 nt, Artificial Sequence
  Synthetic
aggaagaacaagauagaaa

SEQ ID NO: 14252 - RNA, 19 nt, Artificial Sequence
  Synthetic
ccgagaucaucauggaaua

SEQ ID NO: 14253 - RNA, 19 nt, Artificial Sequence
  Synthetic
gauagaaaggguagccaua

SEQ ID NO: 14254 - RNA, 19 nt, Artificial Sequence
  Synthetic
gauaucaaguccaagaaua

SEQ ID NO: 14255 - RNA, 19 nt, Artificial Sequence
  Synthetic
aagaguaaacagagaagaa

SEQ ID NO: 14256 - RNA, 19 nt, Artificial Sequence
  Synthetic
gaacaagauagaaagggua

SEQ ID NO: 14257 - RNA, 19 nt, Artificial Sequence
  Synthetic
cgauagaggugguucugua

SEQ ID NO: 14258 - RNA, 19 nt, Artificial Sequence
  Synthetic
gaagcgagcuggauggcaa

SEQ ID NO: 14259 - RNA, 19 nt, Artificial Sequence
  Synthetic
ccuccagaaauuugggaaa

SEQ ID NO: 14260 - RNA, 19 nt, Artificial Sequence
  Synthetic
cauggaauauggugaggaa

SEQ ID NO: 14261 - RNA, 19 nt, Artificial Sequence
  Synthetic
caggauagcuuugggaaau

SEQ ID NO: 14262 - RNA, 19 nt, Artificial Sequence
  Synthetic
ggaauauggugaggaagua

SEQ ID NO: 14263 - RNA, 19 nt, Artificial Sequence
  Synthetic
uuaaacagcagaaaggaaa

SEQ ID NO: 14264 - RNA, 19 nt, Artificial Sequence
  Synthetic
acuacaugguccugagaau

SEQ ID NO: 14265 - RNA, 19 nt, Artificial Sequence
  Synthetic
gaguaaacagagaagaaaa

SEQ ID NO: 14266 - RNA, 19 nt, Artificial Sequence
  Synthetic
ucaggauagcuuugggaaa

SEQ ID NO: 14267 - RNA, 19 nt, Artificial Sequence
  Synthetic
gugaggaaguauuagaaga

SEQ ID NO: 14268 - RNA, 19 nt, Artificial Sequence
  Synthetic
ugaggaaguauuagaagaa

SEQ ID NO: 14269 - RNA, 19 nt, Artificial Sequence
  Synthetic
ugagaagaguaaacagaga

SEQ ID NO: 14270 - RNA, 19 nt, Artificial Sequence
  Synthetic
uggcaaggccugugcgaca

SEQ ID NO: 14271 - RNA, 19 nt, Artificial Sequence
  Synthetic
ccugaagacaugauacuua

SEQ ID NO: 14272 - RNA, 19 nt, Artificial Sequence
  Synthetic
cggcagagcucuuuugguu

SEQ ID NO: 14273 - RNA, 19 nt, Artificial Sequence
  Synthetic
cugaagacaugauacuuaa

SEQ ID NO: 14274 - RNA, 19 nt, Artificial Sequence
  Synthetic
gagaagaguaaacagagaa

SEQ ID NO: 14275 - RNA, 19 nt, Artificial Sequence
  Synthetic
ccaauuuccucaaccauaa

SEQ ID NO: 14276 - RNA, 19 nt, Artificial Sequence
  Synthetic
gaacagaaaugggaugcua

SEQ ID NO: 14277 - RNA, 19 nt, Artificial Sequence
  Synthetic
ggaaauuacuuaaccucuu

SEQ ID NO: 14278 - RNA, 19 nt, Artificial Sequence
  Synthetic
ugauuaguaucgugaguuu

SEQ ID NO: 14279 - RNA, 19 nt, Artificial Sequence
  Synthetic
cagaagaggcagaggaaau

SEQ ID NO: 14280 - RNA, 19 nt, Artificial Sequence
  Synthetic
aaacaggacuugagcaaua

SEQ ID NO: 14281 - RNA, 19 nt, Artificial Sequence
  Synthetic
gcaaacaggacuugagcaa

SEQ ID NO: 14282 - RNA, 19 nt, Artificial Sequence
  Synthetic
uauaaugggugaaggcaaa

SEQ ID NO: 14283 - RNA, 19 nt, Artificial Sequence
  Synthetic
gauaaaagcaguaggagaa

SEQ ID NO: 14284 - RNA, 19 nt, Artificial Sequence
  Synthetic
ggacagaacagaauaauau

SEQ ID NO: 14285 - RNA, 19 nt, Artificial Sequence
  Synthetic
ggaucaaguugcuggugaa

SEQ ID NO: 14286 - RNA, 19 nt, Artificial Sequence
  Synthetic
ugaauuugauagagaggua

SEQ ID NO: 14287 - RNA, 19 nt, Artificial Sequence
  Synthetic
agacauauauaauggguga

SEQ ID NO: 14288 - RNA, 19 nt, Artificial Sequence
  Synthetic
cgucauaauuccugcuauu

SEQ ID NO: 14289 - RNA, 19 nt, Artificial Sequence
  Synthetic
cuuaaggaguaguugauaa

SEQ ID NO: 14290 - RNA, 19 nt, Artificial Sequence
  Synthetic
aggagaugcugcaggacaa

SEQ ID NO: 14291 - RNA, 19 nt, Artificial Sequence
  Synthetic
caaacaaacccuacaacua

SEQ ID NO: 14292 - RNA, 19 nt, Artificial Sequence
  Synthetic
auucaaacuucaucggaaa

SEQ ID NO: 14293 - RNA, 19 nt, Artificial Sequence
  Synthetic
agagagaggaggcgacuaa

SEQ ID NO: 14294 - RNA, 19 nt, Artificial Sequence
  Synthetic
caucuaggguauauacaaa

SEQ ID NO: 14295 - RNA, 19 nt, Artificial Sequence
  Synthetic
gcacaugggugaaaaguau

SEQ ID NO: 14296 - RNA, 19 nt, Artificial Sequence
  Synthetic
ccuuauauaaagcggcaaa

SEQ ID NO: 14297 - RNA, 19 nt, Artificial Sequence
  Synthetic
aggaugaauuugauagaga

SEQ ID NO: 14298 - RNA, 19 nt, Artificial Sequence
  Synthetic
cuugagaacugauguaauu

SEQ ID NO: 14299 - RNA, 19 nt, Artificial Sequence
  Synthetic
gaagaaaggccgucuguga

SEQ ID NO: 14300 - RNA, 19 nt, Artificial Sequence
  Synthetic
gagaaucagccaagauauu

SEQ ID NO: 14301 - RNA, 19 nt, Artificial Sequence
  Synthetic
gcguaaauauugacaucuu

SEQ ID NO: 14302 - RNA, 19 nt, Artificial Sequence
  Synthetic
gaacaaacaucaucaaagu

SEQ ID NO: 14303 - RNA, 19 nt, Artificial Sequence
  Synthetic
gagcaaaaggccugaagaa

SEQ ID NO: 14304 - RNA, 19 nt, Artificial Sequence
  Synthetic
cggcaaaagaggagagaac

SEQ ID NO: 14305 - RNA, 19 nt, Artificial Sequence
  Synthetic
caguauuucucaaguggaa

SEQ ID NO: 14306 - RNA, 19 nt, Artificial Sequence
  Synthetic
uaacuuaaacacagagcua

SEQ ID NO: 14307 - RNA, 19 nt, Artificial Sequence
  Synthetic
acacauugauggacuuuua

SEQ ID NO: 14308 - RNA, 19 nt, Artificial Sequence
  Synthetic
gaguuaaguucuucuacaa

SEQ ID NO: 14309 - RNA, 19 nt, Artificial Sequence
  Synthetic
ccacggaagucgagaauua

SEQ ID NO: 14310 - RNA, 19 nt, Artificial Sequence
  Synthetic
gggaaggaagcaugggaua

SEQ ID NO: 14311 - RNA, 19 nt, Artificial Sequence
  Synthetic
augugaaucuuuaggguaa

SEQ ID NO: 14312 - RNA, 19 nt, Artificial Sequence
  Synthetic
gggauaaaguggaaaucau

SEQ ID NO: 14313 - RNA, 19 nt, Artificial Sequence
  Synthetic
guaaagggauaaaguggaa

SEQ ID NO: 14314 - RNA, 19 nt, Artificial Sequence
  Synthetic
gauuaacugugaagacuaa

SEQ ID NO: 14315 - RNA, 19 nt, Artificial Sequence
  Synthetic
agacaguggcucugaagaa

SEQ ID NO: 14316 - RNA, 19 nt, Artificial Sequence
  Synthetic
gcaaguuagcuaauacaaa

SEQ ID NO: 14317 - RNA, 19 nt, Artificial Sequence
  Synthetic
ggauuaacugugaagacua

SEQ ID NO: 14318 - RNA, 19 nt, Artificial Sequence
  Synthetic
ucuccaugguugaaauaaa

SEQ ID NO: 14319 - RNA, 19 nt, Artificial Sequence
  Synthetic
gaaggaagcaugggauaua

SEQ ID NO: 14320 - RNA, 19 nt, Artificial Sequence
  Synthetic
cggagaggauccaugagaa

SEQ ID NO: 14321 - RNA, 19 nt, Artificial Sequence
  Synthetic
gaagauaggccgaggacag

SEQ ID NO: 14322 - RNA, 19 nt, Artificial Sequence
  Synthetic
ggauaaaguggaaaucauu

SEQ ID NO: 14323 - RNA, 19 nt, Artificial Sequence
  Synthetic
uuuauaacuuggugaguga

SEQ ID NO: 14324 - RNA, 19 nt, Artificial Sequence
  Synthetic
caacugaaccacccaaaua

SEQ ID NO: 14325 - RNA, 19 nt, Artificial Sequence
  Synthetic
gaagcaugggauauagaaa

SEQ ID NO: 14326 - RNA, 19 nt, Artificial Sequence
  Synthetic
ggaaggaagcaugggauau

SEQ ID NO: 14327 - RNA, 19 nt, Artificial Sequence
  Synthetic
ccagaaauguguuccuuau

SEQ ID NO: 14328 - RNA, 19 nt, Artificial Sequence
  Synthetic
gcaccuggccagaguguca

SEQ ID NO: 14329 - RNA, 19 nt, Artificial Sequence
  Synthetic
gggcuguccuuuacaaauu

SEQ ID NO: 14330 - RNA, 19 nt, Artificial Sequence
  Synthetic
ucgaagacaacgagcugaa

SEQ ID NO: 14331 - RNA, 19 nt, Artificial Sequence
  Synthetic
ccacagaggcaucccaaca

SEQ ID NO: 14332 - RNA, 19 nt, Artificial Sequence
  Synthetic
ucaaguacuuuaagaagca

SEQ ID NO: 14333 - RNA, 19 nt, Artificial Sequence
  Synthetic
cggagaggacaguauggaa

SEQ ID NO: 14334 - RNA, 19 nt, Artificial Sequence
  Synthetic
ggagaggauccaugagaac

SEQ ID NO: 14335 - RNA, 19 nt, Artificial Sequence
  Synthetic
cccuguaucuggauuguaa

SEQ ID NO: 14336 - RNA, 19 nt, Artificial Sequence
  Synthetic
ugacagacagaauuugaaa

SEQ ID NO: 14337 - RNA, 19 nt, Artificial Sequence
  Synthetic
ggaaguacuuugugcagcu

SEQ ID NO: 14338 - RNA, 19 nt, Artificial Sequence
  Synthetic
ugaucaguguuaagcauuu

SEQ ID NO: 14339 - RNA, 19 nt, Artificial Sequence
  Synthetic
agucaugcauagagauaua

SEQ ID NO: 14340 - RNA, 19 nt, Artificial Sequence
  Synthetic
gaaaauuggucgcggacaa

SEQ ID NO: 14341 - RNA, 19 nt, Artificial Sequence
  Synthetic
gguaaaacuuggagaucuu

SEQ ID NO: 14342 - RNA, 19 nt, Artificial Sequence
  Synthetic
caugaagaguguaaccaaa

SEQ ID NO: 14343 - RNA, 19 nt, Artificial Sequence
  Synthetic
cggacaauuuagugaaguu

SEQ ID NO: 14344 - RNA, 19 nt, Artificial Sequence
  Synthetic
gaguguaaccaaaguaauu

SEQ ID NO: 14345 - RNA, 19 nt, Artificial Sequence
  Synthetic
gaggcuaauuccugaaaga

SEQ ID NO: 14346 - RNA, 19 nt, Artificial Sequence
  Synthetic
gaaaguauuuugugcaagu

SEQ ID NO: 14347 - RNA, 19 nt, Artificial Sequence
  Synthetic
uuucagagcuagugugcuu

SEQ ID NO: 14348 - RNA, 19 nt, Artificial Sequence
  Synthetic
ggauaugggcuauaauaca

SEQ ID NO: 14349 - RNA, 19 nt, Artificial Sequence
  Synthetic
ugaaagaacuguuuggaag

SEQ ID NO: 14350 - RNA, 19 nt, Artificial Sequence
  Synthetic
gcaagaucaugaagagugu

SEQ ID NO: 14351 - RNA, 19 nt, Artificial Sequence
  Synthetic
agagucaugcauagagaua

SEQ ID NO: 14352 - RNA, 19 nt, Artificial Sequence
  Synthetic
ccagagagaauacaugaaa

SEQ ID NO: 14353 - RNA, 19 nt, Artificial Sequence
  Synthetic
gcauagagauauaaaacca

SEQ ID NO: 14354 - RNA, 19 nt, Artificial Sequence
  Synthetic
uggaguaccaguagcuuua

SEQ ID NO: 14355 - RNA, 19 nt, Artificial Sequence
  Synthetic
ccauuuaugucugguguua

SEQ ID NO: 14356 - RNA, 19 nt, Artificial Sequence
  Synthetic
gcuaauuccugaaagaacu

SEQ ID NO: 14357 - RNA, 19 nt, Artificial Sequence
  Synthetic
caaccauccaaauguaaua

SEQ ID NO: 14358 - RNA, 19 nt, Artificial Sequence
  Synthetic
acuuggagaucuugggcuu

SEQ ID NO: 14359 - RNA, 19 nt, Artificial Sequence
  Synthetic
gaaagaacuguuuggaagu

SEQ ID NO: 14360 - RNA, 19 nt, Artificial Sequence
  Synthetic
gaagagucaugcauagaga

SEQ ID NO: 14361 - RNA, 19 nt, Artificial Sequence
  Synthetic
cagagagaauacaugaaaa

SEQ ID NO: 14362 - RNA, 19 nt, Artificial Sequence
  Synthetic
cugaaagaacuguuuggaa

SEQ ID NO: 14363 - RNA, 19 nt, Artificial Sequence
  Synthetic
ccggauaugggcuauaaua

SEQ ID NO: 14364 - RNA, 19 nt, Artificial Sequence
  Synthetic
ugagauggcugcauuacaa

SEQ ID NO: 14365 - RNA, 19 nt, Artificial Sequence
  Synthetic
ugauuuaauggaugccaaa

SEQ ID NO: 14366 - RNA, 19 nt, Artificial Sequence
  Synthetic
agaagauagaacaguguga

SEQ ID NO: 14367 - RNA, 19 nt, Artificial Sequence
  Synthetic
gagcugaguucuaaaguuc

SEQ ID NO: 14368 - RNA, 19 nt, Artificial Sequence
  Synthetic
acacaugcauucucgaaga

SEQ ID NO: 14369 - RNA, 19 nt, Artificial Sequence
  Synthetic
gggcagagagcgaagugua

SEQ ID NO: 14370 - RNA, 19 nt, Artificial Sequence
  Synthetic
gggaaggagggaugaggau

SEQ ID NO: 14371 - RNA, 19 nt, Artificial Sequence
  Synthetic
ccuacaaccagaagaguga

SEQ ID NO: 14372 - RNA, 19 nt, Artificial Sequence
  Synthetic
gaacauccugcuugacaaa

SEQ ID NO: 14373 - RNA, 19 nt, Artificial Sequence
  Synthetic
caguggaacagaugaccaa

SEQ ID NO: 14374 - RNA, 19 nt, Artificial Sequence
  Synthetic
gcagcaagagcaaggccua

SEQ ID NO: 14375 - RNA, 19 nt, Artificial Sequence
  Synthetic
gagaggugccuucgggauu

SEQ ID NO: 14376 - RNA, 19 nt, Artificial Sequence
  Synthetic
uuaugaucgccauggaaua

SEQ ID NO: 14377 - RNA, 19 nt, Artificial Sequence
  Synthetic
ggccagugcaguuggauga

SEQ ID NO: 14378 - RNA, 19 nt, Artificial Sequence
  Synthetic
agacaaagcccuuaugauc

SEQ ID NO: 14379 - RNA, 19 nt, Artificial Sequence
  Synthetic
cgucaagaucggugauuuc

SEQ ID NO: 14380 - RNA, 19 nt, Artificial Sequence
  Synthetic
ugaccaaggaagagcggca

SEQ ID NO: 14381 - RNA, 19 nt, Artificial Sequence
  Synthetic
cugaagaucaugaguggca

SEQ ID NO: 14382 - RNA, 19 nt, Artificial Sequence
  Synthetic
ccacugagcgagaacuauu

SEQ ID NO: 14383 - RNA, 19 nt, Artificial Sequence
  Synthetic
gaucaugaguggcaccuuu

SEQ ID NO: 14384 - RNA, 19 nt, Artificial Sequence
  Synthetic
gaacagaugaccaaggaag

SEQ ID NO: 14385 - RNA, 19 nt, Artificial Sequence
  Synthetic
gcuaugaaauggugcaggu

SEQ ID NO: 14386 - RNA, 19 nt, Artificial Sequence
  Synthetic
agaacauccugcuugacaa

SEQ ID NO: 14387 - RNA, 19 nt, Artificial Sequence
  Synthetic
gcgaaaggcugaccagaag

SEQ ID NO: 14388 - RNA, 19 nt, Artificial Sequence
  Synthetic
gcgcgaggucgauugggaa

SEQ ID NO: 14389 - RNA, 19 nt, Artificial Sequence
  Synthetic
ggagcaacagguucaacaa

SEQ ID NO: 14390 - RNA, 19 nt, Artificial Sequence
  Synthetic
ucauugaguacuacgagaa

SEQ ID NO: 14391 - RNA, 19 nt, Artificial Sequence
  Synthetic
ugcgaaaggcugaccagaa

SEQ ID NO: 14392 - RNA, 19 nt, Artificial Sequence
  Synthetic
gaggaggcccugagcuuca

SEQ ID NO: 14393 - RNA, 19 nt, Artificial Sequence
  Synthetic
ugccaaugcucaacacaga

SEQ ID NO: 14394 - RNA, 19 nt, Artificial Sequence
  Synthetic
uggaugagacacacccuua

SEQ ID NO: 14395 - RNA, 19 nt, Artificial Sequence
  Synthetic
uggcugaguucauccaaaa

SEQ ID NO: 14396 - RNA, 19 nt, Artificial Sequence
  Synthetic
gggagcaacagguucaaca

SEQ ID NO: 14397 - RNA, 19 nt, Artificial Sequence
  Synthetic
ccaagauccuuagcagcaa

SEQ ID NO: 14398 - RNA, 19 nt, Artificial Sequence
  Synthetic
cccagaacauccugcuuga

SEQ ID NO: 14399 - RNA, 19 nt, Artificial Sequence
  Synthetic
ggagagagauggaggaaaa

SEQ ID NO: 14400 - RNA, 19 nt, Artificial Sequence
  Synthetic
agguggagguugagagauu

SEQ ID NO: 14401 - RNA, 19 nt, Artificial Sequence
  Synthetic
gcaaaggaagagauggaaa

SEQ ID NO: 14402 - RNA, 19 nt, Artificial Sequence
  Synthetic
gcacuaaacuccaugguca

SEQ ID NO: 14403 - RNA, 19 nt, Artificial Sequence
  Synthetic
cugcagaaguugaacaaga

SEQ ID NO: 14404 - RNA, 19 nt, Artificial Sequence
  Synthetic
caaaggaagagauggaaau

SEQ ID NO: 14405 - RNA, 19 nt, Artificial Sequence
  Synthetic
aggaaacgcaggagagaga

SEQ ID NO: 14406 - RNA, 19 nt, Artificial Sequence
  Synthetic
cagcaaaggaagagaugga

SEQ ID NO: 14407 - RNA, 19 nt, Artificial Sequence
  Synthetic
gaacaagaaauuagaagga

SEQ ID NO: 14408 - RNA, 19 nt, Artificial Sequence
  Synthetic
ccauaaagcuggaauccuu

SEQ ID NO: 14409 - RNA, 19 nt, Artificial Sequence
  Synthetic
ccacagaggccauggggaa

SEQ ID NO: 14410 - RNA, 19 nt, Artificial Sequence
  Synthetic
gugaagaagaggacaguca

SEQ ID NO: 14411 - RNA, 19 nt, Artificial Sequence
  Synthetic
agccaaagcauguggaaaa

SEQ ID NO: 14412 - RNA, 19 nt, Artificial Sequence
  Synthetic
ccacuuaaccuguguguga

SEQ ID NO: 14413 - RNA, 19 nt, Artificial Sequence
  Synthetic
acaagaagcgucugggaau

SEQ ID NO: 14414 - RNA, 19 nt, Artificial Sequence
  Synthetic
gagggaaccuguaugacaa

SEQ ID NO: 14415 - RNA, 19 nt, Artificial Sequence
  Synthetic
gauuauuguugcaguucaa

SEQ ID NO: 14416 - RNA, 19 nt, Artificial Sequence
  Synthetic
gcaccuacaaagagaccaa

SEQ ID NO: 14417 - RNA, 19 nt, Artificial Sequence
  Synthetic
ggacaaaguugcuggcccu

SEQ ID NO: 14418 - RNA, 19 nt, Artificial Sequence
  Synthetic
ccgaggaauggaagguuua

SEQ ID NO: 14419 - RNA, 19 nt, Artificial Sequence
  Synthetic
aagagauggugguguggua

SEQ ID NO: 14420 - RNA, 19 nt, Artificial Sequence
  Synthetic
aggaagagauggaaaugga

SEQ ID NO: 14421 - RNA, 19 nt, Artificial Sequence
  Synthetic
ggacauuucuguugaccca

SEQ ID NO: 14422 - RNA, 19 nt, Artificial Sequence
  Synthetic
uggauucagaagaggauua

SEQ ID NO: 14423 - RNA, 19 nt, Artificial Sequence
  Synthetic
gaacuguacacuuggguga

SEQ ID NO: 14424 - RNA, 19 nt, Artificial Sequence
  Synthetic
gucaaggaguaaaguacaa

SEQ ID NO: 14425 - RNA, 19 nt, Artificial Sequence
  Synthetic
gauccugagcagagaccua

SEQ ID NO: 14426 - RNA, 19 nt, Artificial Sequence
  Synthetic
ugaagaucgugcaaggaau

SEQ ID NO: 14427 - RNA, 19 nt, Artificial Sequence
  Synthetic
ggaaauggauccaaagccu

SEQ ID NO: 14428 - RNA, 19 nt, Artificial Sequence
  Synthetic
cuucgaaaggagcuggaaa

SEQ ID NO: 14429 - RNA, 19 nt, Artificial Sequence
  Synthetic
ccacaaggauguuggaaga

SEQ ID NO: 14430 - RNA, 19 nt, Artificial Sequence
  Synthetic
guguacaucuuuagaguua

SEQ ID NO: 14431 - RNA, 19 nt, Artificial Sequence
  Synthetic
ccaucaaaguggacuauaa

SEQ ID NO: 14432 - RNA, 19 nt, Artificial Sequence
  Synthetic
ccacagaauccguucgaaa

SEQ ID NO: 14433 - RNA, 19 nt, Artificial Sequence
  Synthetic
agaugugaaugcagagaua

SEQ ID NO: 14434 - RNA, 19 nt, Artificial Sequence
  Synthetic
cagcaaacaccaaguacaa

SEQ ID NO: 14435 - RNA, 19 nt, Artificial Sequence
  Synthetic
gcucacgaaucuauggaua

SEQ ID NO: 14436 - RNA, 19 nt, Artificial Sequence
  Synthetic
ggucgaagaucaaguacau

SEQ ID NO: 14437 - RNA, 19 nt, Artificial Sequence
  Synthetic
gugagaaauucaaagagua

SEQ ID NO: 14438 - RNA, 19 nt, Artificial Sequence
  Synthetic
ggucagagguuacgccauu

SEQ ID NO: 14439 - RNA, 19 nt, Artificial Sequence
  Synthetic
cgaaaggccucccgaaaga

SEQ ID NO: 14440 - RNA, 19 nt, Artificial Sequence
  Synthetic
guacaaagggaauuccaaa

SEQ ID NO: 14441 - RNA, 19 nt, Artificial Sequence
  Synthetic
cgaauacacucuaugaauu

SEQ ID NO: 14442 - RNA, 19 nt, Artificial Sequence
  Synthetic
uguccuuggaagugagaaa

SEQ ID NO: 14443 - RNA, 19 nt, Artificial Sequence
  Synthetic
ugauaauggaaaugagaca

SEQ ID NO: 14444 - RNA, 19 nt, Artificial Sequence
  Synthetic
gcucauaguagcaggucuu

SEQ ID NO: 14445 - RNA, 19 nt, Artificial Sequence
  Synthetic
ugaaagugaccuagaugaa

SEQ ID NO: 14446 - RNA, 19 nt, Artificial Sequence
  Synthetic
gaaacgagcugccugcaaa

SEQ ID NO: 14447 - RNA, 19 nt, Artificial Sequence
  Synthetic
guauagugaugaaguugaa

SEQ ID NO: 14448 - RNA, 19 nt, Artificial Sequence
  Synthetic
ucaccagauacaagaguua

SEQ ID NO: 14449 - RNA, 19 nt, Artificial Sequence
  Synthetic
cugaaaaugauguuggaaa

SEQ ID NO: 14450 - RNA, 19 nt, Artificial Sequence
  Synthetic
ccaccaaaguauagugaug

SEQ ID NO: 14451 - RNA, 19 nt, Artificial Sequence
  Synthetic
ccggauggaucuuuauuua

SEQ ID NO: 14452 - RNA, 19 nt, Artificial Sequence
  Synthetic
gagcugaaacccauugaua

SEQ ID NO: 14453 - RNA, 19 nt, Artificial Sequence
  Synthetic
gugaugaaguugaauugaa

SEQ ID NO: 14454 - RNA, 19 nt, Artificial Sequence
  Synthetic
gcacggaacucaaagggca

SEQ ID NO: 14455 - RNA, 19 nt, Artificial Sequence
  Synthetic
ggaagggauugcuagggaa

SEQ ID NO: 14456 - RNA, 19 nt, Artificial Sequence
  Synthetic
acacaauaaaccugaugaa

SEQ ID NO: 14457 - RNA, 19 nt, Artificial Sequence
  Synthetic
agaucaaguacauggagua

SEQ ID NO: 14458 - RNA, 19 nt, Artificial Sequence
  Synthetic
ucauaaguacaaagggaau

SEQ ID NO: 14459 - RNA, 19 nt, Artificial Sequence
  Synthetic
gagugaugguggaagauaa

SEQ ID NO: 14460 - RNA, 19 nt, Artificial Sequence
  Synthetic
cagaauugaugcagaguga

SEQ ID NO: 14461 - RNA, 19 nt, Artificial Sequence
  Synthetic
ggccagaguggaagaauua

SEQ ID NO: 14462 - RNA, 19 nt, Artificial Sequence
  Synthetic
gcgcaagagccaacgcaaa

SEQ ID NO: 14463 - RNA, 19 nt, Artificial Sequence
  Synthetic
uugcaauucuggagguuaa

SEQ ID NO: 14464 - RNA, 19 nt, Artificial Sequence
  Synthetic
ggguagagagaaugaguuu

SEQ ID NO: 14465 - RNA, 19 nt, Artificial Sequence
  Synthetic
gaauauuguuucaggcaca

SEQ ID NO: 14466 - RNA, 19 nt, Artificial Sequence
  Synthetic
ccgacagguuaaagaaauu

SEQ ID NO: 14467 - RNA, 19 nt, Artificial Sequence
  Synthetic
acuacuaggacgaagaaua

SEQ ID NO: 14468 - RNA, 19 nt, Artificial Sequence
  Synthetic
uggaacagcagaaaggaaa

SEQ ID NO: 14469 - RNA, 19 nt, Artificial Sequence
  Synthetic
gguggaagauaauguacua

SEQ ID NO: 14470 - RNA, 19 nt, Artificial Sequence
  Synthetic
ugaucaagcccuauaauua

SEQ ID NO: 14471 - RNA, 19 nt, Artificial Sequence
  Synthetic
agacauuaagccagggaau

SEQ ID NO: 14472 - RNA, 19 nt, Artificial Sequence
  Synthetic
cauuuuacaucgagacauu

SEQ ID NO: 14473 - RNA, 19 nt, Artificial Sequence
  Synthetic
gcagagugaccuacauaaa

SEQ ID NO: 14474 - RNA, 19 nt, Artificial Sequence
  Synthetic
gaaagagaguagcgcucaa

SEQ ID NO: 14475 - RNA, 19 nt, Artificial Sequence
  Synthetic
caacuguguucuaaagauu

SEQ ID NO: 14476 - RNA, 19 nt, Artificial Sequence
  Synthetic
cuacuaggacgaagaauau

SEQ ID NO: 14477 - RNA, 19 nt, Artificial Sequence
  Synthetic
gguguugucuggucaguaa

SEQ ID NO: 14478 - RNA, 19 nt, Artificial Sequence
  Synthetic
cuaccuagaugaagggcga

SEQ ID NO: 14479 - RNA, 19 nt, Artificial Sequence
  Synthetic
uggccagaguggaagaauu

SEQ ID NO: 14480 - RNA, 19 nt, Artificial Sequence
  Synthetic
ccucuaacuuguuuggauu

SEQ ID NO: 14481 - RNA, 19 nt, Artificial Sequence
  Synthetic
ggugaugugugcugucuaa

SEQ ID NO: 14482 - RNA, 19 nt, Artificial Sequence
  Synthetic
cauguuaaacccugggcaa

SEQ ID NO: 14483 - RNA, 19 nt, Artificial Sequence
  Synthetic
uggauuggccagaguggaa

SEQ ID NO: 14484 - RNA, 19 nt, Artificial Sequence
  Synthetic
uggaagaauuagaugaauc

SEQ ID NO: 14485 - RNA, 19 nt, Artificial Sequence
  Synthetic
aaucaugcuuguacuguaa

SEQ ID NO: 14486 - RNA, 19 nt, Artificial Sequence
  Synthetic
agaacuagcuugcacauuu

SEQ ID NO: 14487 - RNA, 19 nt, Artificial Sequence
  Synthetic
gagaaugaguuugugacua

SEQ ID NO: 14488 - RNA, 19 nt, Artificial Sequence
  Synthetic
ugacugaugaagacauaaa

SEQ ID NO: 14489 - RNA, 19 nt, Artificial Sequence
  Synthetic
ggaccaggcuguaggaaau

SEQ ID NO: 14490 - RNA, 19 nt, Artificial Sequence
  Synthetic
cugaggaacugguagauua

SEQ ID NO: 14491 - RNA, 19 nt, Artificial Sequence
  Synthetic
gggucuugugggagagauu

SEQ ID NO: 14492 - RNA, 19 nt, Artificial Sequence
  Synthetic
gagagauuaucaagcguuu

SEQ ID NO: 14493 - RNA, 19 nt, Artificial Sequence
  Synthetic
ccgccuuguuggucugaaa

SEQ ID NO: 14494 - RNA, 19 nt, Artificial Sequence
  Synthetic
gcauacaaguuggcaggaa

SEQ ID NO: 14495 - RNA, 19 nt, Artificial Sequence
  Synthetic
gaacuggaucuaugaauga

SEQ ID NO: 14496 - RNA, 19 nt, Artificial Sequence
  Synthetic
caaguuggcaggaacauua

SEQ ID NO: 14497 - RNA, 19 nt, Artificial Sequence
  Synthetic
gcucagaacuggaucuaug

SEQ ID NO: 14498 - RNA, 19 nt, Artificial Sequence
  Synthetic
gggcagaccacauugcuuu

SEQ ID NO: 14499 - RNA, 19 nt, Artificial Sequence
  Synthetic
guaccuucauugcgaucaa

SEQ ID NO: 14500 - RNA, 19 nt, Artificial Sequence
  Synthetic
gaacauuauacauggcagu

SEQ ID NO: 14501 - RNA, 19 nt, Artificial Sequence
  Synthetic
cagagaaggagaucggcuu

SEQ ID NO: 14502 - RNA, 19 nt, Artificial Sequence
  Synthetic
ccacauugcuuuucacauc

SEQ ID NO: 14503 - RNA, 19 nt, Artificial Sequence
  Synthetic
auacaaguuggcaggaaca

SEQ ID NO: 14504 - RNA, 19 nt, Artificial Sequence
  Synthetic
cagccggaguucaaaccua

SEQ ID NO: 14505 - RNA, 19 nt, Artificial Sequence
  Synthetic
cauuauacauggcagugau

SEQ ID NO: 14506 - RNA, 19 nt, Artificial Sequence
  Synthetic
cauacaaguuggcaggaac

SEQ ID NO: 14507 - RNA, 19 nt, Artificial Sequence
  Synthetic
ccguggagacuucugcaua

SEQ ID NO: 14508 - RNA, 19 nt, Artificial Sequence
  Synthetic
gcuguaggaaaucuaguua

SEQ ID NO: 14509 - RNA, 19 nt, Artificial Sequence
  Synthetic
acaggaacuucaucauaau

SEQ ID NO: 14510 - RNA, 19 nt, Artificial Sequence
  Synthetic
uacaggaacuucaucauaa

SEQ ID NO: 14511 - RNA, 19 nt, Artificial Sequence
  Synthetic
gaaccauggccaacuguga

SEQ ID NO: 14512 - RNA, 19 nt, Artificial Sequence
  Synthetic
agccggaguucaaaccuaa

SEQ ID NO: 14513 - RNA, 19 nt, Artificial Sequence
  Synthetic
aagaucuucucaaggaaca

SEQ ID NO: 14514 - RNA, 19 nt, Artificial Sequence
  Synthetic
gagaucggcuugugguuuc

SEQ ID NO: 14515 - RNA, 19 nt, Artificial Sequence
  Synthetic
agaacuggaucuaugaaug

SEQ ID NO: 14516 - RNA, 19 nt, Artificial Sequence
  Synthetic
uuacaggaacuucaucaua

SEQ ID NO: 14517 - RNA, 19 nt, Artificial Sequence
  Synthetic
cguggagacuucugcauac

SEQ ID NO: 14518 - RNA, 19 nt, Artificial Sequence
  Synthetic
ggagaucggcuugugguuu

SEQ ID NO: 14519 - RNA, 19 nt, Artificial Sequence
  Synthetic
cugaagaacugguugacua

SEQ ID NO: 14520 - RNA, 19 nt, Artificial Sequence
  Synthetic
gaaaucagccuaugguuua

SEQ ID NO: 14521 - RNA, 19 nt, Artificial Sequence
  Synthetic
gguuuaagccugaagaacu

SEQ ID NO: 14522 - RNA, 19 nt, Artificial Sequence
  Synthetic
ugacugggucuaugaauaa

SEQ ID NO: 14523 - RNA, 19 nt, Artificial Sequence
  Synthetic
augacugggucuaugaaua

SEQ ID NO: 14524 - RNA, 19 nt, Artificial Sequence
  Synthetic
cugaagaacaccugaagca

SEQ ID NO: 14525 - RNA, 19 nt, Artificial Sequence
  Synthetic
uggcagugauucaguaaaa

SEQ ID NO: 14526 - RNA, 19 nt, Artificial Sequence
  Synthetic
agaaaucagccuaugguuu

SEQ ID NO: 14527 - RNA, 19 nt, Artificial Sequence
  Synthetic
gcgagaucaucaagcgcuu

SEQ ID NO: 14528 - RNA, 19 nt, Artificial Sequence
  Synthetic
aagaacugguugacuacaa

SEQ ID NO: 14529 - RNA, 19 nt, Artificial Sequence
  Synthetic
gaacaucauucauggcagu

SEQ ID NO: 14530 - RNA, 19 nt, Artificial Sequence
  Synthetic
gcacuacauugaccugaaa

SEQ ID NO: 14531 - RNA, 19 nt, Artificial Sequence
  Synthetic
gugaagacaggccgaguga

SEQ ID NO: 14532 - RNA, 19 nt, Artificial Sequence
  Synthetic
gaagacaggccgagugaug

SEQ ID NO: 14533 - RNA, 19 nt, Artificial Sequence
  Synthetic
cauucauggcagugauuca

SEQ ID NO: 14534 - RNA, 19 nt, Artificial Sequence
  Synthetic
ucccugggcuggugaagua

SEQ ID NO: 14535 - RNA, 19 nt, Artificial Sequence
  Synthetic
gccuaugguuuaagccuga

SEQ ID NO: 14536 - RNA, 19 nt, Artificial Sequence
  Synthetic
gcauucagguuggcaggaa

SEQ ID NO: 14537 - RNA, 19 nt, Artificial Sequence
  Synthetic
guuuaagccugaagaacug

SEQ ID NO: 14538 - RNA, 19 nt, Artificial Sequence
  Synthetic
gcaacaggauugaucauuc

SEQ ID NO: 14539 - RNA, 19 nt, Artificial Sequence
  Synthetic
gcaccuucaucgccaucaa

SEQ ID NO: 14540 - RNA, 19 nt, Artificial Sequence
  Synthetic
ccugaaagaccgaccauuc

SEQ ID NO: 14541 - RNA, 19 nt, Artificial Sequence
  Synthetic
ucaagcgcuucgagcagaa

SEQ ID NO: 14542 - RNA, 19 nt, Artificial Sequence
  Synthetic
caacaggauugaucauucu

SEQ ID NO: 14543 - RNA, 19 nt, Artificial Sequence
  Synthetic
caggauugaucauucuuuu

SEQ ID NO: 14544 - RNA, 19 nt, Artificial Sequence
  Synthetic
gggcugaacguggugaaga

SEQ ID NO: 14545 - RNA, 19 nt, Artificial Sequence
  Synthetic
gggcuggugaaguacauga

SEQ ID NO: 14546 - RNA, 19 nt, Artificial Sequence
  Synthetic
ugaagcagcacuacauuga

SEQ ID NO: 14547 - RNA, 19 nt, Artificial Sequence
  Synthetic
cagguuggcaggaacauca

SEQ ID NO: 14548 - RNA, 19 nt, Artificial Sequence
  Synthetic
ggacacagcucuucauucc

SEQ ID NO: 14549 - RNA, 19 nt, Artificial Sequence
  Synthetic
ccaacgugguccaagguuu

SEQ ID NO: 14550 - RNA, 19 nt, Artificial Sequence
  Synthetic
gcaucgagguuggcaagaa

SEQ ID NO: 14551 - RNA, 19 nt, Artificial Sequence
  Synthetic
caacgugguccaagguuuu

SEQ ID NO: 14552 - RNA, 19 nt, Artificial Sequence
  Synthetic
ggcacuggcuguaugagua

SEQ ID NO: 14553 - RNA, 19 nt, Artificial Sequence
  Synthetic
ucaaguugguggcgcugaa

SEQ ID NO: 14554 - RNA, 19 nt, Artificial Sequence
  Synthetic
uggacgggcugcugaacau

SEQ ID NO: 14555 - RNA, 19 nt, Artificial Sequence
  Synthetic
gcaccuuccuggccgugaa

SEQ ID NO: 14556 - RNA, 19 nt, Artificial Sequence
  Synthetic
caucgagguuggcaagaac

SEQ ID NO: 14557 - RNA, 19 nt, Artificial Sequence
  Synthetic
ggauuucugcaucgagguu

SEQ ID NO: 14558 - RNA, 19 nt, Artificial Sequence
  Synthetic
gcacuggcuguaugaguag

SEQ ID NO: 14559 - RNA, 19 nt, Artificial Sequence
  Synthetic
gcgcuuggagcaucccuuu

SEQ ID NO: 14560 - RNA, 19 nt, Artificial Sequence
  Synthetic
gcaccgccaucaugaucug

SEQ ID NO: 14561 - RNA, 19 nt, Artificial Sequence
  Synthetic
gcugggcacuggcuguaug

SEQ ID NO: 14562 - RNA, 19 nt, Artificial Sequence
  Synthetic
caucuucgcuaaccucuuc

SEQ ID NO: 14563 - RNA, 19 nt, Artificial Sequence
  Synthetic
gcuuggagcaucccuuugg

SEQ ID NO: 14564 - RNA, 19 nt, Artificial Sequence
  Synthetic
gggacgugauccagcgcuu

SEQ ID NO: 14565 - RNA, 19 nt, Artificial Sequence
  Synthetic
ccaaagugccggacaaccu

SEQ ID NO: 14566 - RNA, 19 nt, Artificial Sequence
  Synthetic
uaucauaaccucuccucua

SEQ ID NO: 14567 - RNA, 19 nt, Artificial Sequence
  Synthetic
caacuaccuccgucagcaa

SEQ ID NO: 14568 - RNA, 19 nt, Artificial Sequence
  Synthetic
caaaccugccugucccaaa

SEQ ID NO: 14569 - RNA, 19 nt, Artificial Sequence
  Synthetic
ccacuuacuucccuguuca

SEQ ID NO: 14570 - RNA, 19 nt, Artificial Sequence
  Synthetic
gaagcccgauggcgugcaa

SEQ ID NO: 14571 - RNA, 19 nt, Artificial Sequence
  Synthetic
gaacccaagcccacaucca

SEQ ID NO: 14572 - RNA, 19 nt, Artificial Sequence
  Synthetic
aucauaaccucuccucuaa

SEQ ID NO: 14573 - RNA, 19 nt, Artificial Sequence
  Synthetic
ggacgugauccagcgcuuu

SEQ ID NO: 14574 - RNA, 19 nt, Artificial Sequence
  Synthetic
guccacaucagcaggaaug

SEQ ID NO: 14575 - RNA, 19 nt, Artificial Sequence
  Synthetic
caaagugccggacaaccuu

SEQ ID NO: 14576 - RNA, 19 nt, Artificial Sequence
  Synthetic
cuaccuccgucagcaagaa

SEQ ID NO: 14577 - RNA, 19 nt, Artificial Sequence
  Synthetic
ggggaggcauuaaaauuca

SEQ ID NO: 14578 - RNA, 19 nt, Artificial Sequence
  Synthetic
aaaccugccugucccaaac

SEQ ID NO: 14579 - RNA, 19 nt, Artificial Sequence
  Synthetic
ccaagccagcacaagauug

SEQ ID NO: 14580 - RNA, 19 nt, Artificial Sequence
  Synthetic
caagccagcacaagauugg

SEQ ID NO: 14581 - RNA, 19 nt, Artificial Sequence
  Synthetic
cauaaccucuccucuaaag

SEQ ID NO: 14582 - RNA, 19 nt, Artificial Sequence
  Synthetic
uaaaggggaggcauuaaaa

SEQ ID NO: 14583 - RNA, 19 nt, Artificial Sequence
  Synthetic
gacuucagcguccacauca

SEQ ID NO: 14584 - RNA, 19 nt, Artificial Sequence
  Synthetic
ugacuucagcguccacauc

SEQ ID NO: 14585 - RNA, 19 nt, Artificial Sequence
  Synthetic
gacgugauccagcgcuuug

SEQ ID NO: 14586 - RNA, 19 nt, Artificial Sequence
  Synthetic
caacuucagugccuuucug

SEQ ID NO: 14587 - RNA, 19 nt, Artificial Sequence
  Synthetic
cuucuacccugcccucauc

SEQ ID NO: 14588 - RNA, 19 nt, Artificial Sequence
  Synthetic
acaaagaggaggagauaca

SEQ ID NO: 14589 - RNA, 19 nt, Artificial Sequence
  Synthetic
ggaaagagaaauacguuuu

SEQ ID NO: 14590 - RNA, 19 nt, Artificial Sequence
  Synthetic
cgaaagaacaaaucaugaa

SEQ ID NO: 14591 - RNA, 19 nt, Artificial Sequence
  Synthetic
gcacagaugaccuaaggaa

SEQ ID NO: 14592 - RNA, 19 nt, Artificial Sequence
  Synthetic
ugacaaagaggaggagaua

SEQ ID NO: 14593 - RNA, 19 nt, Artificial Sequence
  Synthetic
ccauccaauuguagaagaa

SEQ ID NO: 14594 - RNA, 19 nt, Artificial Sequence
  Synthetic
aggaggagauacaagauau

SEQ ID NO: 14595 - RNA, 19 nt, Artificial Sequence
  Synthetic
ccucagauauauguagaaa

SEQ ID NO: 14596 - RNA, 19 nt, Artificial Sequence
  Synthetic
cggaaagagaaauacguuu

SEQ ID NO: 14597 - RNA, 19 nt, Artificial Sequence
  Synthetic
ggaggagauacaagauauu

SEQ ID NO: 14598 - RNA, 19 nt, Artificial Sequence
  Synthetic
cugcuaaggacuauuuaaa

SEQ ID NO: 14599 - RNA, 19 nt, Artificial Sequence
  Synthetic
gaggaggagauacaagaua

SEQ ID NO: 14600 - RNA, 19 nt, Artificial Sequence
  Synthetic
ugacuuugcugcugcggaa

SEQ ID NO: 14601 - RNA, 19 nt, Artificial Sequence
  Synthetic
gggaccaaauaauagcuua

SEQ ID NO: 14602 - RNA, 19 nt, Artificial Sequence
  Synthetic
gcugcugcggaaagagaaa

SEQ ID NO: 14603 - RNA, 19 nt, Artificial Sequence
  Synthetic
uuacaugaguucuggacca

SEQ ID NO: 14604 - RNA, 19 nt, Artificial Sequence
  Synthetic
uugacaaagaggaggagau

SEQ ID NO: 14605 - RNA, 19 nt, Artificial Sequence
  Synthetic
ccaugauauuagcuagaca

SEQ ID NO: 14606 - RNA, 19 nt, Artificial Sequence
  Synthetic
ggacaagcugcuaaggacu

SEQ ID NO: 14607 - RNA, 19 nt, Artificial Sequence
  Synthetic
caauuguagaagaaccuua

SEQ ID NO: 14608 - RNA, 19 nt, Artificial Sequence
  Synthetic
ggagacacauccagacagu

SEQ ID NO: 14609 - RNA, 19 nt, Artificial Sequence
  Synthetic
ccaaauaauagcuuaguag

SEQ ID NO: 14610 - RNA, 19 nt, Artificial Sequence
  Synthetic
ccuaacaaacccaaacuuu

SEQ ID NO: 14611 - RNA, 19 nt, Artificial Sequence
  Synthetic
ugaaggacucacagagcuu

SEQ ID NO: 14612 - RNA, 19 nt, Artificial Sequence
  Synthetic
ugagcaauguaguaacuuu

SEQ ID NO: 14613 - RNA, 19 nt, Artificial Sequence
  Synthetic
gcugauuggcugcugaaaa

SEQ ID NO: 14614 - RNA, 19 nt, Artificial Sequence
  Synthetic
gacaagcugcuaaggacua

SEQ ID NO: 14615 - RNA, 19 nt, Artificial Sequence
  Synthetic
ggaccaaauaauagcuuag

SEQ ID NO: 14616 - RNA, 19 nt, Artificial Sequence
  Synthetic
cagcagauccuuugauuug

SEQ ID NO: 14617 - RNA, 19 nt, Artificial Sequence
  Synthetic
cagcagacccuuugauuug

SEQ ID NO: 14618 - RNA, 19 nt, Artificial Sequence
  Synthetic
gaagauugccagagguuuu

SEQ ID NO: 14619 - RNA, 19 nt, Artificial Sequence
  Synthetic
gagaacuacuguggagaaa

SEQ ID NO: 14620 - RNA, 19 nt, Artificial Sequence
  Synthetic
ggagaaaggaagauugcca

SEQ ID NO: 14621 - RNA, 19 nt, Artificial Sequence
  Synthetic
gcugguaugaggaggaaga

SEQ ID NO: 14622 - RNA, 19 nt, Artificial Sequence
  Synthetic
uguacgaaugagagaacua

SEQ ID NO: 14623 - RNA, 19 nt, Artificial Sequence
  Synthetic
cagcagauucuaagcaaca

SEQ ID NO: 14624 - RNA, 19 nt, Artificial Sequence
  Synthetic
gcagagagauugcagccuu

SEQ ID NO: 14625 - RNA, 19 nt, Artificial Sequence
  Synthetic
ccacuauguagcuggaaca

SEQ ID NO: 14626 - RNA, 19 nt, Artificial Sequence
  Synthetic
agagaacuacuguggagaa

SEQ ID NO: 14627 - RNA, 19 nt, Artificial Sequence
  Synthetic
aggaagauugccagagguu

SEQ ID NO: 14628 - RNA, 19 nt, Artificial Sequence
  Synthetic
cuauguagcuggaacagga

SEQ ID NO: 14629 - RNA, 19 nt, Artificial Sequence
  Synthetic
gugcuauagcccagaggga

SEQ ID NO: 14630 - RNA, 19 nt, Artificial Sequence
  Synthetic
ugaugcaggucuaugaaga

SEQ ID NO: 14631 - RNA, 19 nt, Artificial Sequence
  Synthetic
guucaucagcagauucuaa

SEQ ID NO: 14632 - RNA, 19 nt, Artificial Sequence
  Synthetic
guuucagccagcagagaga

SEQ ID NO: 14633 - RNA, 19 nt, Artificial Sequence
  Synthetic
ccugauuguacgaaugaga

SEQ ID NO: 14634 - RNA, 19 nt, Artificial Sequence
  Synthetic
gcuguggcccugugugcua

SEQ ID NO: 14635 - RNA, 19 nt, Artificial Sequence
  Synthetic
agagggagguguccacuau

SEQ ID NO: 14636 - RNA, 19 nt, Artificial Sequence
  Synthetic
aucagaggcugguggaguu

SEQ ID NO: 14637 - RNA, 19 nt, Artificial Sequence
  Synthetic
gcgcugguaugaggaggaa

SEQ ID NO: 14638 - RNA, 19 nt, Artificial Sequence
  Synthetic
gaacuacuguggagaaagg

SEQ ID NO: 14639 - RNA, 19 nt, Artificial Sequence
  Synthetic
ggaagauugccagagguuu

SEQ ID NO: 14640 - RNA, 19 nt, Artificial Sequence
  Synthetic
gguucggacucugugguuu

SEQ ID NO: 14641 - RNA, 19 nt, Artificial Sequence
  Synthetic
ccagacuucuccuagacau

SEQ ID NO: 14642 - RNA, 19 nt, Artificial Sequence
  Synthetic
gcacuggggcuccgaauga

SEQ ID NO: 14643 - RNA, 19 nt, Artificial Sequence
  Synthetic
gggagguguccacuaugua

SEQ ID NO: 14644 - RNA, 19 nt, Artificial Sequence
  Synthetic
gugaacagcgcugguauga

SEQ ID NO: 14645 - RNA, 19 nt, Artificial Sequence
  Synthetic
guuccugauuguacgaaug

SEQ ID NO: 14646 - RNA, 19 nt, Artificial Sequence
  Synthetic
gauucuaagcaacaaguuc

SEQ ID NO: 14647 - RNA, 19 nt, Artificial Sequence
  Synthetic
gauucuauccgugggaguu

SEQ ID NO: 14648 - RNA, 19 nt, Artificial Sequence
  Synthetic
gugaaggacuguugggaaa

SEQ ID NO: 14649 - RNA, 19 nt, Artificial Sequence
  Synthetic
ggaaagaagcauuggauuu

SEQ ID NO: 14650 - RNA, 19 nt, Artificial Sequence
  Synthetic
ggguuaauguugaggaauu

SEQ ID NO: 14651 - RNA, 19 nt, Artificial Sequence
  Synthetic
aucaaaggcuggagaaaua

SEQ ID NO: 14652 - RNA, 19 nt, Artificial Sequence
  Synthetic
ggaaagauccugauggcua

SEQ ID NO: 14653 - RNA, 19 nt, Artificial Sequence
  Synthetic
gauaauuagugguguggaa

SEQ ID NO: 14654 - RNA, 19 nt, Artificial Sequence
  Synthetic
gaauaaugcuacaaagaca

SEQ ID NO: 14655 - RNA, 19 nt, Artificial Sequence
  Synthetic
gaacagauggcauaagaaa

SEQ ID NO: 14656 - RNA, 19 nt, Artificial Sequence
  Synthetic
acaaagacauuucgagaau

SEQ ID NO: 14657 - RNA, 19 nt, Artificial Sequence
  Synthetic
gcugagauccugagacaau

SEQ ID NO: 14658 - RNA, 19 nt, Artificial Sequence
  Synthetic
gugcugagauccugagaca

SEQ ID NO: 14659 - RNA, 19 nt, Artificial Sequence
  Synthetic
ccauggagauuuuaagaga

SEQ ID NO: 14660 - RNA, 19 nt, Artificial Sequence
  Synthetic
cagaauaaugcuacaaaga

SEQ ID NO: 14661 - RNA, 19 nt, Artificial Sequence
  Synthetic
ccagagaaauggaguuguu

SEQ ID NO: 14662 - RNA, 19 nt, Artificial Sequence
  Synthetic
gcaacaaagugaaugucuu

SEQ ID NO: 14663 - RNA, 19 nt, Artificial Sequence
  Synthetic
cggcaaacacugcuaaauu

SEQ ID NO: 14664 - RNA, 19 nt, Artificial Sequence
  Synthetic
ugcuauaugugaauggaaa

SEQ ID NO: 14665 - RNA, 19 nt, Artificial Sequence
  Synthetic
gcacuguacuccuggcaau

SEQ ID NO: 14666 - RNA, 19 nt, Artificial Sequence
  Synthetic
gaaagauccugauggcuau

SEQ ID NO: 14667 - RNA, 19 nt, Artificial Sequence
  Synthetic
gcaaacacugcuaaauuua

SEQ ID NO: 14668 - RNA, 19 nt, Artificial Sequence
  Synthetic
cagagcaaucuuugguaaa

SEQ ID NO: 14669 - RNA, 19 nt, Artificial Sequence
  Synthetic
ccagcugggcaguaggaaa

SEQ ID NO: 14670 - RNA, 19 nt, Artificial Sequence
  Synthetic
cuacaaagacauuucgaga

SEQ ID NO: 14671 - RNA, 19 nt, Artificial Sequence
  Synthetic
guuuuaaccugacugaaua

SEQ ID NO: 14672 - RNA, 19 nt, Artificial Sequence
  Synthetic
ggauggaucuguugaaaug

SEQ ID NO: 14673 - RNA, 19 nt, Artificial Sequence
  Synthetic
aaacaaagcuggauuuacu

SEQ ID NO: 14674 - RNA, 19 nt, Artificial Sequence
  Synthetic
caauggagauucaacagaa

SEQ ID NO: 14675 - RNA, 19 nt, Artificial Sequence
  Synthetic
ggaaaguaaagaagucaca

SEQ ID NO: 14676 - RNA, 19 nt, Artificial Sequence
  Synthetic
cuuuggaacagauggcaua

SEQ ID NO: 14677 - RNA, 19 nt, Artificial Sequence
  Synthetic
agaugaugcuauaugugaa

SEQ ID NO: 14678 - RNA, 19 nt, Artificial Sequence
  Synthetic
aggcauaccuggaggagaa

SEQ ID NO: 14679 - RNA, 19 nt, Artificial Sequence
  Synthetic
ccucaagaauggagucuaa

SEQ ID NO: 14680 - RNA, 19 nt, Artificial Sequence
  Synthetic
uguacaagguggagacaau

SEQ ID NO: 14681 - RNA, 19 nt, Artificial Sequence
  Synthetic
auguagaaaugaagggcaa

SEQ ID NO: 14682 - RNA, 19 nt, Artificial Sequence
  Synthetic
cagcauauuauaagggcaa

SEQ ID NO: 14683 - RNA, 19 nt, Artificial Sequence
  Synthetic
cgaacaaucuggaggaacu

SEQ ID NO: 14684 - RNA, 19 nt, Artificial Sequence
  Synthetic
ggaagaugcagcuggagaa

SEQ ID NO: 14685 - RNA, 19 nt, Artificial Sequence
  Synthetic
gcagcaacauccuggacaa

SEQ ID NO: 14686 - RNA, 19 nt, Artificial Sequence
  Synthetic
gcauugagcugacacgaaa

SEQ ID NO: 14687 - RNA, 19 nt, Artificial Sequence
  Synthetic
gccaaaggauggaaguaau

SEQ ID NO: 14688 - RNA, 19 nt, Artificial Sequence
  Synthetic
gcgcaaaggccgaguuauc

SEQ ID NO: 14689 - RNA, 19 nt, Artificial Sequence
  Synthetic
ggauggaaguaauuugaau

SEQ ID NO: 14690 - RNA, 19 nt, Artificial Sequence
  Synthetic
cauauaaagacccagauaa

SEQ ID NO: 14691 - RNA, 19 nt, Artificial Sequence
  Synthetic
acuaugggcuggagagcuu

SEQ ID NO: 14692 - RNA, 19 nt, Artificial Sequence
  Synthetic
uguuugaacugaagcauau

SEQ ID NO: 14693 - RNA, 19 nt, Artificial Sequence
  Synthetic
uggaggaacugguggagga

SEQ ID NO: 14694 - RNA, 19 nt, Artificial Sequence
  Synthetic
ccaaaggauggaaguaauu

SEQ ID NO: 14695 - RNA, 19 nt, Artificial Sequence
  Synthetic
acauauaaagacccagaua

SEQ ID NO: 14696 - RNA, 19 nt, Artificial Sequence
  Synthetic
cagauaaucccgaguacuu

SEQ ID NO: 14697 - RNA, 19 nt, Artificial Sequence
  Synthetic
ucagugacauuguggguuu

SEQ ID NO: 14698 - RNA, 19 nt, Artificial Sequence
  Synthetic
aaaugaagggcaaaggcaa

SEQ ID NO: 14699 - RNA, 19 nt, Artificial Sequence
  Synthetic
agaugcagcuggagaagga

SEQ ID NO: 14700 - RNA, 19 nt, Artificial Sequence
  Synthetic
gagcaaggacacaccguuu

SEQ ID NO: 14701 - RNA, 19 nt, Artificial Sequence
  Synthetic
cccaagagcugguggcugu

SEQ ID NO: 14702 - RNA, 19 nt, Artificial Sequence
  Synthetic
agggagaacagcagcaaca

SEQ ID NO: 14703 - RNA, 19 nt, Artificial Sequence
  Synthetic
gugcuggaguggugggacu

SEQ ID NO: 14704 - RNA, 19 nt, Artificial Sequence
  Synthetic
aggagaagcgcaaggcuga

SEQ ID NO: 14705 - RNA, 19 nt, Artificial Sequence
  Synthetic
gcauggagcaguacgcgaa

SEQ ID NO: 14706 - RNA, 19 nt, Artificial Sequence
  Synthetic
gcucaagaucaccgacuau

SEQ ID NO: 14707 - RNA, 19 nt, Artificial Sequence
  Synthetic
ccagugaagacaccagaua

SEQ ID NO: 14708 - RNA, 19 nt, Artificial Sequence
  Synthetic
ccaucaaacaugugaauaa

SEQ ID NO: 14709 - RNA, 19 nt, Artificial Sequence
  Synthetic
ccaaagagauuguccagaa

SEQ ID NO: 14710 - RNA, 19 nt, Artificial Sequence
  Synthetic
ccaacugaaugaagagcua

SEQ ID NO: 14711 - RNA, 19 nt, Artificial Sequence
  Synthetic
gaacaaugaccgagagacu

SEQ ID NO: 14712 - RNA, 19 nt, Artificial Sequence
  Synthetic
auguggaaaugaagggaaa

SEQ ID NO: 14713 - RNA, 19 nt, Artificial Sequence
  Synthetic
gcaccagcauauuggacaa

SEQ ID NO: 14714 - RNA, 19 nt, Artificial Sequence
  Synthetic
ucguauggcccuagcauua

SEQ ID NO: 14715 - RNA, 19 nt, Artificial Sequence
  Synthetic
ucacaaaggugcaggcagu

SEQ ID NO: 14716 - RNA, 19 nt, Artificial Sequence
  Synthetic
aggccuaucuggaggaaaa

SEQ ID NO: 14717 - RNA, 19 nt, Artificial Sequence
  Synthetic
uggagaagcugguggagga

SEQ ID NO: 14718 - RNA, 19 nt, Artificial Sequence
  Synthetic
gggauuaugucuucuuuua

SEQ ID NO: 14719 - RNA, 19 nt, Artificial Sequence
  Synthetic
cgacccauccugugauaaa

SEQ ID NO: 14720 - RNA, 19 nt, Artificial Sequence
  Synthetic
ccggucacuucaagggaaa

SEQ ID NO: 14721 - RNA, 19 nt, Artificial Sequence
  Synthetic
gcucagcccuguacauaua

SEQ ID NO: 14722 - RNA, 19 nt, Artificial Sequence
  Synthetic
ucuacaagguggagacgau

SEQ ID NO: 14723 - RNA, 19 nt, Artificial Sequence
  Synthetic
cuucaggcccagagggaga

SEQ ID NO: 14724 - RNA, 19 nt, Artificial Sequence
  Synthetic
ggacaagaacaaugaccga

SEQ ID NO: 14725 - RNA, 19 nt, Artificial Sequence
  Synthetic
cgugggaguuuacaggaua

SEQ ID NO: 14726 - RNA, 19 nt, Artificial Sequence
  Synthetic
ugagagauguucaguucaa

SEQ ID NO: 14727 - RNA, 19 nt, Artificial Sequence
  Synthetic
gaaugagacaauacaggaa

SEQ ID NO: 14728 - RNA, 19 nt, Artificial Sequence
  Synthetic
augcugaaguccugaauga

SEQ ID NO: 14729 - RNA, 19 nt, Artificial Sequence
  Synthetic
gcagaaggcugacgucuau

SEQ ID NO: 14730 - RNA, 19 nt, Artificial Sequence
  Synthetic
ggacccaacugaaugaaga

SEQ ID NO: 14731 - RNA, 19 nt, Artificial Sequence
  Synthetic
cagaacacaaccugagcua

SEQ ID NO: 14732 - RNA, 19 nt, Artificial Sequence
  Synthetic
acgaagauaucacggugua

SEQ ID NO: 14733 - RNA, 19 nt, Artificial Sequence
  Synthetic
gcuagcauguuguggcgua

SEQ ID NO: 14734 - RNA, 19 nt, Artificial Sequence
  Synthetic
gaaagcugaugcuggagaa

SEQ ID NO: 14735 - RNA, 19 nt, Artificial Sequence
  Synthetic
cauacuggcucuuaggaga

SEQ ID NO: 14736 - RNA, 19 nt, Artificial Sequence
  Synthetic
ggacaaucgcacccgggaa

SEQ ID NO: 14737 - RNA, 19 nt, Artificial Sequence
  Synthetic
gguguaugcccgagagcca

SEQ ID NO: 14738 - RNA, 19 nt, Artificial Sequence
  Synthetic
guguagagguuguguggaa

SEQ ID NO: 14739 - RNA, 19 nt, Artificial Sequence
  Synthetic
uagaagagaccuugaacaa

SEQ ID NO: 14740 - RNA, 19 nt, Artificial Sequence
  Synthetic
aggaagaagaagaaaguga

SEQ ID NO: 14741 - RNA, 19 nt, Artificial Sequence
  Synthetic
ggccauggauacagaggaa

SEQ ID NO: 14742 - RNA, 19 nt, Artificial Sequence
  Synthetic
gcucagacccaaagguaga

SEQ ID NO: 14743 - RNA, 19 nt, Artificial Sequence
  Synthetic
ggaagaagaagaaagugaa

SEQ ID NO: 14744 - RNA, 19 nt, Artificial Sequence
  Synthetic
agaggaagguguagagguu

SEQ ID NO: 14745 - RNA, 19 nt, Artificial Sequence
  Synthetic
gagaagagcagaagaaucu

SEQ ID NO: 14746 - RNA, 19 nt, Artificial Sequence
  Synthetic
uggcagugcuggagauuca

SEQ ID NO: 14747 - RNA, 19 nt, Artificial Sequence
  Synthetic
agucugagauuuuggaaga

SEQ ID NO: 14748 - RNA, 19 nt, Artificial Sequence
  Synthetic
agaagaagaaagugaagau

SEQ ID NO: 14749 - RNA, 19 nt, Artificial Sequence
  Synthetic
gggcugacauuaaagagaa

SEQ ID NO: 14750 - RNA, 19 nt, Artificial Sequence
  Synthetic
ugcugaaguuggaggacaa

SEQ ID NO: 14751 - RNA, 19 nt, Artificial Sequence
  Synthetic
cacaagacgaugaaugaaa

SEQ ID NO: 14752 - RNA, 19 nt, Artificial Sequence
  Synthetic
gagaacaaggccaggguca

SEQ ID NO: 14753 - RNA, 19 nt, Artificial Sequence
  Synthetic
caacagcaguggacaucua

SEQ ID NO: 14754 - RNA, 19 nt, Artificial Sequence
  Synthetic
ccuugaagaugucaggaau

SEQ ID NO: 14755 - RNA, 19 nt, Artificial Sequence
  Synthetic
ugugaagacuugucgagaa

SEQ ID NO: 14756 - RNA, 19 nt, Artificial Sequence
  Synthetic
aagaagaaagugaagauga

SEQ ID NO: 14757 - RNA, 19 nt, Artificial Sequence
  Synthetic
gcugugaccugaugccaaa

SEQ ID NO: 14758 - RNA, 19 nt, Artificial Sequence
  Synthetic
acuacaagcugcaggagga

SEQ ID NO: 14759 - RNA, 19 nt, Artificial Sequence
  Synthetic
ggcgagaagaggugaauca

SEQ ID NO: 14760 - RNA, 19 nt, Artificial Sequence
  Synthetic
ugacaacagcaguggacau

SEQ ID NO: 14761 - RNA, 19 nt, Artificial Sequence
  Synthetic
ucucugaacgcaagaacua

SEQ ID NO: 14762 - RNA, 19 nt, Artificial Sequence
  Synthetic
ccugaugccaaaugagaau

SEQ ID NO: 14763 - RNA, 19 nt, Artificial Sequence
  Synthetic
gucgagaagagcagaagaa

SEQ ID NO: 14764 - RNA, 19 nt, Artificial Sequence
  Synthetic
aagcguuggugcacacaaa

SEQ ID NO: 14765 - RNA, 19 nt, Artificial Sequence
  Synthetic
gugaagacuugucgagaag

SEQ ID NO: 14766 - RNA, 19 nt, Artificial Sequence
  Synthetic
ugcuggagauucagggcaa

SEQ ID NO: 14767 - RNA, 19 nt, Artificial Sequence
  Synthetic
cuucuuugcaccagaguau

SEQ ID NO: 14768 - RNA, 19 nt, Artificial Sequence
  Synthetic
cauaaugggaugucagaaa

SEQ ID NO: 14769 - RNA, 19 nt, Artificial Sequence
  Synthetic
auacgaaggugaaggagaa

SEQ ID NO: 14770 - RNA, 19 nt, Artificial Sequence
  Synthetic
ggacagagacugcaaguau

SEQ ID NO: 14771 - RNA, 19 nt, Artificial Sequence
  Synthetic
gggcauggaaucaggagaa

SEQ ID NO: 14772 - RNA, 19 nt, Artificial Sequence
  Synthetic
caaaagaaaccaagaagaa

SEQ ID NO: 14773 - RNA, 19 nt, Artificial Sequence
  Synthetic
aggaaaccuuggugggauu

SEQ ID NO: 14774 - RNA, 19 nt, Artificial Sequence
  Synthetic
gcaccaaagaugucagaga

SEQ ID NO: 14775 - RNA, 19 nt, Artificial Sequence
  Synthetic
ggucauagacagcaccaua

SEQ ID NO: 14776 - RNA, 19 nt, Artificial Sequence
  Synthetic
guggaugacauuaguauua

SEQ ID NO: 14777 - RNA, 19 nt, Artificial Sequence
  Synthetic
caagagagguccugaaugu

SEQ ID NO: 14778 - RNA, 19 nt, Artificial Sequence
  Synthetic
caaagaugucagagauuau

SEQ ID NO: 14779 - RNA, 19 nt, Artificial Sequence
  Synthetic
cgaagucuuuugagggcaa

SEQ ID NO: 14780 - RNA, 19 nt, Artificial Sequence
  Synthetic
cgauaaauguggcgauacu

SEQ ID NO: 14781 - RNA, 19 nt, Artificial Sequence
  Synthetic
ccaaagaugucagagauua

SEQ ID NO: 14782 - RNA, 19 nt, Artificial Sequence
  Synthetic
gcucuggaauguuggguau

SEQ ID NO: 14783 - RNA, 19 nt, Artificial Sequence
  Synthetic
gacccauaccagagaauua

SEQ ID NO: 14784 - RNA, 19 nt, Artificial Sequence
  Synthetic
ggaagcaccgagagaacaa

SEQ ID NO: 14785 - RNA, 19 nt, Artificial Sequence
  Synthetic
cauggaaucaggagaaauu

SEQ ID NO: 14786 - RNA, 19 nt, Artificial Sequence
  Synthetic
guauacgguugcaagauaa

SEQ ID NO: 14787 - RNA, 19 nt, Artificial Sequence
  Synthetic
aaucagaguuuccaacaua

SEQ ID NO: 14788 - RNA, 19 nt, Artificial Sequence
  Synthetic
gagaguggauacagguaga

SEQ ID NO: 14789 - RNA, 19 nt, Artificial Sequence
  Synthetic
ggaaaguucuguggaaaga

SEQ ID NO: 14790 - RNA, 19 nt, Artificial Sequence
  Synthetic
acaagguguucaugaggaa

SEQ ID NO: 14791 - RNA, 19 nt, Artificial Sequence
  Synthetic
acgaaaaucagaagggcaa

SEQ ID NO: 14792 - RNA, 19 nt, Artificial Sequence
  Synthetic
accagaagccagaggagua

SEQ ID NO: 14793 - RNA, 19 nt, Artificial Sequence
  Synthetic
aguauacgguugcaagaua

SEQ ID NO: 14794 - RNA, 19 nt, Artificial Sequence
  Synthetic
cagagauuauccuggaauu

SEQ ID NO: 14795 - RNA, 19 nt, Artificial Sequence
  Synthetic
gagaaggugacaagaacau

SEQ ID NO: 14796 - RNA, 19 nt, Artificial Sequence
  Synthetic
cugaauacacagaguacuu

SEQ ID NO: 14797 - RNA, 19 nt, Artificial Sequence
  Synthetic
gagcagugucucagaagau

SEQ ID NO: 14798 - RNA, 19 nt, Artificial Sequence
  Synthetic
cagaaauacaugagagaga

SEQ ID NO: 14799 - RNA, 19 nt, Artificial Sequence
  Synthetic
gcaccacacuggagaacua

SEQ ID NO: 14800 - RNA, 19 nt, Artificial Sequence
  Synthetic
gggcaaacacugugggaac

SEQ ID NO: 14801 - RNA, 19 nt, Artificial Sequence
  Synthetic
caucgaaucuccuggguuu

SEQ ID NO: 14802 - RNA, 19 nt, Artificial Sequence
  Synthetic
gagagaaggauaugaagau

SEQ ID NO: 14803 - RNA, 19 nt, Artificial Sequence
  Synthetic
gggaaacacagaauggcua

SEQ ID NO: 14804 - RNA, 19 nt, Artificial Sequence
  Synthetic
gcuccauggugaugacaau

SEQ ID NO: 14805 - RNA, 19 nt, Artificial Sequence
  Synthetic
agaaggauaugaagaugaa

SEQ ID NO: 14806 - RNA, 19 nt, Artificial Sequence
  Synthetic
gagaaggauaugaagauga

SEQ ID NO: 14807 - RNA, 19 nt, Artificial Sequence
  Synthetic
gugcggaggucguuugaau

SEQ ID NO: 14808 - RNA, 19 nt, Artificial Sequence
  Synthetic
ccagagcauuugugcgcaa

SEQ ID NO: 14809 - RNA, 19 nt, Artificial Sequence
  Synthetic
gagguggacuggagcaauu

SEQ ID NO: 14810 - RNA, 19 nt, Artificial Sequence
  Synthetic
gcuccaugcucuacaucaa

SEQ ID NO: 14811 - RNA, 19 nt, Artificial Sequence
  Synthetic
acaccaagugagaggccaa

SEQ ID NO: 14812 - RNA, 19 nt, Artificial Sequence
  Synthetic
ggagaggacuggauggugu

SEQ ID NO: 14813 - RNA, 19 nt, Artificial Sequence
  Synthetic
aggaguggcuucagguaga

SEQ ID NO: 14814 - RNA, 19 nt, Artificial Sequence
  Synthetic
uguggaagccagagcauuu

SEQ ID NO: 14815 - RNA, 19 nt, Artificial Sequence
  Synthetic
caacugaggugguucugaa

SEQ ID NO: 14816 - RNA, 19 nt, Artificial Sequence
  Synthetic
ccuacagccuaaacggcaa

SEQ ID NO: 14817 - RNA, 19 nt, Artificial Sequence
  Synthetic
cagaauggcuacuauguca

SEQ ID NO: 14818 - RNA, 19 nt, Artificial Sequence
  Synthetic
gaaaagagcuggcuguaca

SEQ ID NO: 14819 - RNA, 19 nt, Artificial Sequence
  Synthetic
acuuugaaaucgagaagca

SEQ ID NO: 14820 - RNA, 19 nt, Artificial Sequence
  Synthetic
ucgagaagcacgacugcaa

SEQ ID NO: 14821 - RNA, 19 nt, Artificial Sequence
  Synthetic
agaaauacaugagagagaa

SEQ ID NO: 14822 - RNA, 19 nt, Artificial Sequence
  Synthetic
caacaaauguggacggaga

SEQ ID NO: 14823 - RNA, 19 nt, Artificial Sequence
  Synthetic
ggucaagauuggugauuuu

SEQ ID NO: 14824 - RNA, 19 nt, Artificial Sequence
  Synthetic
gcucauggucuucgaguau

SEQ ID NO: 14825 - RNA, 19 nt, Artificial Sequence
  Synthetic
cuggagacccgguggagaa

SEQ ID NO: 14826 - RNA, 19 nt, Artificial Sequence
  Synthetic
gcgcagagaaccugacuga

SEQ ID NO: 14827 - RNA, 19 nt, Artificial Sequence
  Synthetic
ccacaauacuucagugaug

SEQ ID NO: 14828 - RNA, 19 nt, Artificial Sequence
  Synthetic
ccagugaccucaacaggaa

SEQ ID NO: 14829 - RNA, 19 nt, Artificial Sequence
  Synthetic
gcugcagugucaugggcaa

SEQ ID NO: 14830 - RNA, 19 nt, Artificial Sequence
  Synthetic
gcaacugucuagugggcca

SEQ ID NO: 14831 - RNA, 19 nt, Artificial Sequence
  Synthetic
aaauguggacggagaaaca

SEQ ID NO: 14832 - RNA, 19 nt, Artificial Sequence
  Synthetic
gcggagugccugaacagaa

SEQ ID NO: 14833 - RNA, 19 nt, Artificial Sequence
  Synthetic
ggagaagaaggacgaaaca

SEQ ID NO: 14834 - RNA, 19 nt, Artificial Sequence
  Synthetic
gagacccgguggagaagaa

SEQ ID NO: 14835 - RNA, 19 nt, Artificial Sequence
  Synthetic
ccaaugagaccgugcggca

SEQ ID NO: 14836 - RNA, 19 nt, Artificial Sequence
  Synthetic
ucacagagcuggagcaguc

SEQ ID NO: 14837 - RNA, 19 nt, Artificial Sequence
  Synthetic
cagcaacgccacagcauca

SEQ ID NO: 14838 - RNA, 19 nt, Artificial Sequence
  Synthetic
ggacaacccuuucgaguuc

SEQ ID NO: 14839 - RNA, 19 nt, Artificial Sequence
  Synthetic
cgguggagaagaaggacga

SEQ ID NO: 14840 - RNA, 19 nt, Artificial Sequence
  Synthetic
acaagaugcugguggcugu

SEQ ID NO: 14841 - RNA, 19 nt, Artificial Sequence
  Synthetic
aacagaagcugcaguguca

SEQ ID NO: 14842 - RNA, 19 nt, Artificial Sequence
  Synthetic
agagcauccuguaccguaa

SEQ ID NO: 14843 - RNA, 19 nt, Artificial Sequence
  Synthetic
guggagaagaaggacgaaa

SEQ ID NO: 14844 - RNA, 19 nt, Artificial Sequence
  Synthetic
acaaauguggacggagaaa

SEQ ID NO: 14845 - RNA, 19 nt, Artificial Sequence
  Synthetic
ugacugagcucuacaucga

SEQ ID NO: 14846 - RNA, 19 nt, Artificial Sequence
  Synthetic
caccagaggucuacgccau

SEQ ID NO: 14847 - RNA, 19 nt, Artificial Sequence
  Synthetic
ucauggucuucgaguauau

SEQ ID NO: 14848 - RNA, 19 nt, Artificial Sequence
  Synthetic
cugucaaggcacugaagga

SEQ ID NO: 14849 - RNA, 19 nt, Artificial Sequence
  Synthetic
gcaugagcagggauaucua

SEQ ID NO: 14850 - RNA, 19 nt, Artificial Sequence
  Synthetic
gagucucucuccuggaaaa

SEQ ID NO: 14851 - RNA, 19 nt, Artificial Sequence
  Synthetic
gccgggacaucgugcucaa

SEQ ID NO: 14852 - RNA, 19 nt, Artificial Sequence
  Synthetic
guacagauaucgagaguuu

SEQ ID NO: 14853 - RNA, 19 nt, Artificial Sequence
  Synthetic
agacaaaggccuuaacaaa

SEQ ID NO: 14854 - RNA, 19 nt, Artificial Sequence
  Synthetic
ggaagaacaucaagggcau

SEQ ID NO: 14855 - RNA, 19 nt, Artificial Sequence
  Synthetic
gaacagaaguaaugaaauc

SEQ ID NO: 14856 - RNA, 19 nt, Artificial Sequence
  Synthetic
aggaaauucacgacggaaa

SEQ ID NO: 14857 - RNA, 19 nt, Artificial Sequence
  Synthetic
ggaaaaucuuguaggagaa

SEQ ID NO: 14858 - RNA, 19 nt, Artificial Sequence
  Synthetic
gggaugucguccuggauaa

SEQ ID NO: 14859 - RNA, 19 nt, Artificial Sequence
  Synthetic
ccacagacgucacugauaa

SEQ ID NO: 14860 - RNA, 19 nt, Artificial Sequence
  Synthetic
aaugaaagcagcaagaaua

SEQ ID NO: 14861 - RNA, 19 nt, Artificial Sequence
  Synthetic
gggagaacuugcuggugaa

SEQ ID NO: 14862 - RNA, 19 nt, Artificial Sequence
  Synthetic
cggaaaaucuuguaggaga

SEQ ID NO: 14863 - RNA, 19 nt, Artificial Sequence
  Synthetic
gaaugaaagcagcaagaau

SEQ ID NO: 14864 - RNA, 19 nt, Artificial Sequence
  Synthetic
ggauuuugccuuuugguaa

SEQ ID NO: 14865 - RNA, 19 nt, Artificial Sequence
  Synthetic
guguagauccugagaacau

SEQ ID NO: 14866 - RNA, 19 nt, Artificial Sequence
  Synthetic
ccagagagaaagaagauuu

SEQ ID NO: 14867 - RNA, 19 nt, Artificial Sequence
  Synthetic
gggaacaucucucggucua

SEQ ID NO: 14868 - RNA, 19 nt, Artificial Sequence
  Synthetic
gauuaaaauuuguggcuca

SEQ ID NO: 14869 - RNA, 19 nt, Artificial Sequence
  Synthetic
ccugagaacaucaccgaaa

SEQ ID NO: 14870 - RNA, 19 nt, Artificial Sequence
  Synthetic
caauuuuacccgaaacaaa

SEQ ID NO: 14871 - RNA, 19 nt, Artificial Sequence
  Synthetic
caacaagcaccgaggaguu

SEQ ID NO: 14872 - RNA, 19 nt, Artificial Sequence
  Synthetic
caaucuggcuucugcauua

SEQ ID NO: 14873 - RNA, 19 nt, Artificial Sequence
  Synthetic
cagagagaaagaagauuua

SEQ ID NO: 14874 - RNA, 19 nt, Artificial Sequence
  Synthetic
aagaugauguugaagcuua

SEQ ID NO: 14875 - RNA, 19 nt, Artificial Sequence
  Synthetic
caaacaaugaggugauaga

SEQ ID NO: 14876 - RNA, 19 nt, Artificial Sequence
  Synthetic
gguuagaaaucaucaacga

SEQ ID NO: 14877 - RNA, 19 nt, Artificial Sequence
  Synthetic
caauauugaaugaguccaa

SEQ ID NO: 14878 - RNA, 19 nt, Artificial Sequence
  Synthetic
ccaagaaugaguaugggaa

SEQ ID NO: 14879 - RNA, 19 nt, Artificial Sequence
  Synthetic
aauuguggauucuggauua

SEQ ID NO: 14880 - RNA, 19 nt, Artificial Sequence
  Synthetic
aggccgagcuccugaccaa

SEQ ID NO: 14881 - RNA, 19 nt, Artificial Sequence
  Synthetic
gcaccgaggaguuaagaga

SEQ ID NO: 14882 - RNA, 19 nt, Artificial Sequence
  Synthetic
gcagcaagacugagaucaa

SEQ ID NO: 14883 - RNA, 19 nt, Artificial Sequence
  Synthetic
ggagagacaucgugcugaa

SEQ ID NO: 14884 - RNA, 19 nt, Artificial Sequence
  Synthetic
cagagaacguggugggcau

SEQ ID NO: 14885 - RNA, 19 nt, Artificial Sequence
  Synthetic
ccaaagagguguacgaugu

SEQ ID NO: 14886 - RNA, 19 nt, Artificial Sequence
  Synthetic
cuaccaagagggagagauu

SEQ ID NO: 14887 - RNA, 19 nt, Artificial Sequence
  Synthetic
gcgaacaucuucauauaaa

SEQ ID NO: 14888 - RNA, 19 nt, Artificial Sequence
  Synthetic
acggacaucucaaggaaua

SEQ ID NO: 14889 - RNA, 19 nt, Artificial Sequence
  Synthetic
gggaauugcaguuggagca

SEQ ID NO: 14890 - RNA, 19 nt, Artificial Sequence
  Synthetic
caucaagaacucaggacuu

SEQ ID NO: 14891 - RNA, 19 nt, Artificial Sequence
  Synthetic
ucaucauggucuuugaaua

SEQ ID NO: 14892 - RNA, 19 nt, Artificial Sequence
  Synthetic
cacauuaagaggagagaca

SEQ ID NO: 14893 - RNA, 19 nt, Artificial Sequence
  Synthetic
aauacuaccaagagggaga

SEQ ID NO: 14894 - RNA, 19 nt, Artificial Sequence
  Synthetic
cugccugguuggagcgaau

SEQ ID NO: 14895 - RNA, 19 nt, Artificial Sequence
  Synthetic
gugagggagccuuuggaaa

SEQ ID NO: 14896 - RNA, 19 nt, Artificial Sequence
  Synthetic
aagcgaacaucuucauaua

SEQ ID NO: 14897 - RNA, 19 nt, Artificial Sequence
  Synthetic
ucgucaugaucaacaaaua

SEQ ID NO: 14898 - RNA, 19 nt, Artificial Sequence
  Synthetic
gagcgaaucugcuagugaa

SEQ ID NO: 14899 - RNA, 19 nt, Artificial Sequence
  Synthetic
ccguggacauggagcucua

SEQ ID NO: 14900 - RNA, 19 nt, Artificial Sequence
  Synthetic
ucucaaacacggaggucau

SEQ ID NO: 14901 - RNA, 19 nt, Artificial Sequence
  Synthetic
ucaccaaccugcagcauga

SEQ ID NO: 14902 - RNA, 19 nt, Artificial Sequence
  Synthetic
cggaaguucacuacagaga

SEQ ID NO: 14903 - RNA, 19 nt, Artificial Sequence
  Synthetic
gggcaggauucagggaaca

SEQ ID NO: 14904 - RNA, 19 nt, Artificial Sequence
  Synthetic
ccacaaaccagaagaagac

SEQ ID NO: 14905 - RNA, 19 nt, Artificial Sequence
  Synthetic
acgcugagucuucgggaau

SEQ ID NO: 14906 - RNA, 19 nt, Artificial Sequence
  Synthetic
aggccaagcucaacagcca

SEQ ID NO: 14907 - RNA, 19 nt, Artificial Sequence
  Synthetic
cccacaaaccagaagaaga

SEQ ID NO: 14908 - RNA, 19 nt, Artificial Sequence
  Synthetic
gcgagaacugggugaggga

SEQ ID NO: 14909 - RNA, 19 nt, Artificial Sequence
  Synthetic
cagcagcgguugaacauca

SEQ ID NO: 14910 - RNA, 19 nt, Artificial Sequence
  Synthetic
ccacauugccagucagauc

SEQ ID NO: 14911 - RNA, 19 nt, Artificial Sequence
  Synthetic
uugcaauggcucuggauca

SEQ ID NO: 14912 - RNA, 19 nt, Artificial Sequence
  Synthetic
gggaaaggcaguuggagaa

SEQ ID NO: 14913 - RNA, 19 nt, Artificial Sequence
  Synthetic
cagagaagguggaggaauc

SEQ ID NO: 14914 - RNA, 19 nt, Artificial Sequence
  Synthetic
acaaugaagcccaguguaa

SEQ ID NO: 14915 - RNA, 19 nt, Artificial Sequence
  Synthetic
gagaagagguaagcgguua

SEQ ID NO: 14916 - RNA, 19 nt, Artificial Sequence
  Synthetic
gaaucaagguccagagaag

SEQ ID NO: 14917 - RNA, 19 nt, Artificial Sequence
  Synthetic
cuuaguggcaccagaguaa

SEQ ID NO: 14918 - RNA, 19 nt, Artificial Sequence
  Synthetic
gaacagagcgggaucaaga

SEQ ID NO: 14919 - RNA, 19 nt, Artificial Sequence
  Synthetic
ccuacaagcuggcugagaa

SEQ ID NO: 14920 - RNA, 19 nt, Artificial Sequence
  Synthetic
gagaagugcugauggucuu

SEQ ID NO: 14921 - RNA, 19 nt, Artificial Sequence
  Synthetic
ggagagcgcaggcgugaaa

SEQ ID NO: 14922 - RNA, 19 nt, Artificial Sequence
  Synthetic
gaucaagaauuucacagaa

SEQ ID NO: 14923 - RNA, 19 nt, Artificial Sequence
  Synthetic
agguggaggaggugaccaa

SEQ ID NO: 14924 - RNA, 19 nt, Artificial Sequence
  Synthetic
gcuguuagauugugaguuc

SEQ ID NO: 14925 - RNA, 19 nt, Artificial Sequence
  Synthetic
gcgagguggagaaggugaa

SEQ ID NO: 14926 - RNA, 19 nt, Artificial Sequence
  Synthetic
agaggaagguggaggaggu

SEQ ID NO: 14927 - RNA, 19 nt, Artificial Sequence
  Synthetic
gccuggagcuagaggacca

SEQ ID NO: 14928 - RNA, 19 nt, Artificial Sequence
  Synthetic
uaacgucaguccacagaaa

SEQ ID NO: 14929 - RNA, 19 nt, Artificial Sequence
  Synthetic
caucccagcuggaguucaa

SEQ ID NO: 14930 - RNA, 19 nt, Artificial Sequence
  Synthetic
aggcaaagcagcacagugu

SEQ ID NO: 14931 - RNA, 19 nt, Artificial Sequence
  Synthetic
ccaagcaucuuuuguauuu

SEQ ID NO: 14932 - RNA, 19 nt, Artificial Sequence
  Synthetic
ggaucaagaauuucacaga

SEQ ID NO: 14933 - RNA, 19 nt, Artificial Sequence
  Synthetic
caaccucacuaaugccaua

SEQ ID NO: 14934 - RNA, 19 nt, Artificial Sequence
  Synthetic
cuggagagccugaucaaca

SEQ ID NO: 14935 - RNA, 19 nt, Artificial Sequence
  Synthetic
aggaguuggucaaggagca

SEQ ID NO: 14936 - RNA, 19 nt, Artificial Sequence
  Synthetic
agaaggagcuggaagaccu

SEQ ID NO: 14937 - RNA, 19 nt, Artificial Sequence
  Synthetic
agagcgggaucaagaauuu

SEQ ID NO: 14938 - RNA, 19 nt, Artificial Sequence
  Synthetic
gcaaagacggcaacaacca

SEQ ID NO: 14939 - RNA, 19 nt, Artificial Sequence
  Synthetic
uggagaaggugaagcugga

SEQ ID NO: 14940 - RNA, 19 nt, Artificial Sequence
  Synthetic
gcugaagaaagaagaaauc

SEQ ID NO: 14941 - RNA, 19 nt, Artificial Sequence
  Synthetic
agcagaaggagcuggaaga

SEQ ID NO: 14942 - RNA, 19 nt, Artificial Sequence
  Synthetic
ggauggauuuugugaauaa

SEQ ID NO: 14943 - RNA, 19 nt, Artificial Sequence
  Synthetic
guaaacugcuccagggaaa

SEQ ID NO: 14944 - RNA, 19 nt, Artificial Sequence
  Synthetic
ucacacaccuuuugagaaa

SEQ ID NO: 14945 - RNA, 19 nt, Artificial Sequence
  Synthetic
ggauacaaaugguguuaau

SEQ ID NO: 14946 - RNA, 19 nt, Artificial Sequence
  Synthetic
ccacaguacuauuaagaga

SEQ ID NO: 14947 - RNA, 19 nt, Artificial Sequence
  Synthetic
cugaaagucuugaaaguau

SEQ ID NO: 14948 - RNA, 19 nt, Artificial Sequence
  Synthetic
uugccaaccucaagaauaa

SEQ ID NO: 14949 - RNA, 19 nt, Artificial Sequence
  Synthetic
caauaggaagagaguguua

SEQ ID NO: 14950 - RNA, 19 nt, Artificial Sequence
  Synthetic
ggaaauaagugucaucuuu

SEQ ID NO: 14951 - RNA, 19 nt, Artificial Sequence
  Synthetic
uaucagaggaagaagcaua

SEQ ID NO: 14952 - RNA, 19 nt, Artificial Sequence
  Synthetic
acccaaagcuuucuaguaa

SEQ ID NO: 14953 - RNA, 19 nt, Artificial Sequence
  Synthetic
ggagaaggaagcagaauau

SEQ ID NO: 14954 - RNA, 19 nt, Artificial Sequence
  Synthetic
gaaaacagguauagccaaa

SEQ ID NO: 14955 - RNA, 19 nt, Artificial Sequence
  Synthetic
ugaaagagguaugaaguaa

SEQ ID NO: 14956 - RNA, 19 nt, Artificial Sequence
  Synthetic
agaaggaagcagaauauaa

SEQ ID NO: 14957 - RNA, 19 nt, Artificial Sequence
  Synthetic
gaaguaaucuguaguguuu

SEQ ID NO: 14958 - RNA, 19 nt, Artificial Sequence
  Synthetic
ucacuaaauuggaggcuga

SEQ ID NO: 14959 - RNA, 19 nt, Artificial Sequence
  Synthetic
aggaaacccuaaaggagaa

SEQ ID NO: 14960 - RNA, 19 nt, Artificial Sequence
  Synthetic
gccaaauucaagaaagaua

SEQ ID NO: 14961 - RNA, 19 nt, Artificial Sequence
  Synthetic
uagccaaauucaagaaaga

SEQ ID NO: 14962 - RNA, 19 nt, Artificial Sequence
  Synthetic
gguaaucccuccagccuaa

SEQ ID NO: 14963 - RNA, 19 nt, Artificial Sequence
  Synthetic
uuucaaaggucuggacuaa

SEQ ID NO: 14964 - RNA, 19 nt, Artificial Sequence
  Synthetic
ggaccuaacuauacaucuu

SEQ ID NO: 14965 - RNA, 19 nt, Artificial Sequence
  Synthetic
ccacaugccaggacagaga

SEQ ID NO: 14966 - RNA, 19 nt, Artificial Sequence
  Synthetic
gaaagagguaugaaguaau

SEQ ID NO: 14967 - RNA, 19 nt, Artificial Sequence
  Synthetic
ggacggugcuuguuugaau

SEQ ID NO: 14968 - RNA, 19 nt, Artificial Sequence
  Synthetic
ugacagagcccgagcaaag

SEQ ID NO: 14969 - RNA, 19 nt, Artificial Sequence
  Synthetic
cuucugaacuggaggaucu

SEQ ID NO: 14970 - RNA, 19 nt, Artificial Sequence
  Synthetic
ccacguacuagcagccaaa

SEQ ID NO: 14971 - RNA, 19 nt, Artificial Sequence
  Synthetic
agcaauuccuaguuaguua

SEQ ID NO: 14972 - RNA, 19 nt, Artificial Sequence
  Synthetic
cuggagagcucaagacagu

SEQ ID NO: 14973 - RNA, 19 nt, Artificial Sequence
  Synthetic
cuaaauuggaggcugaaau

SEQ ID NO: 14974 - RNA, 19 nt, Artificial Sequence
  Synthetic
gauagagaacccaaaguuu

SEQ ID NO: 14975 - RNA, 19 nt, Artificial Sequence
  Synthetic
gcagagacuaggacccuua

SEQ ID NO: 14976 - RNA, 19 nt, Artificial Sequence
  Synthetic
agagagacgcuguggggaa

SEQ ID NO: 14977 - RNA, 19 nt, Artificial Sequence
  Synthetic
guggggaacucaagaggaa

SEQ ID NO: 14978 - RNA, 19 nt, Artificial Sequence
  Synthetic
ccaaaguagaguucuguuu

SEQ ID NO: 14979 - RNA, 19 nt, Artificial Sequence
  Synthetic
cccaauaauucgacucuuu

SEQ ID NO: 14980 - RNA, 19 nt, Artificial Sequence
  Synthetic
acuagcagccaaagagaga

SEQ ID NO: 14981 - RNA, 19 nt, Artificial Sequence
  Synthetic
gagaaaagaacacagauau

SEQ ID NO: 14982 - RNA, 19 nt, Artificial Sequence
  Synthetic
uugaauggaccuaacuaua

SEQ ID NO: 14983 - RNA, 19 nt, Artificial Sequence
  Synthetic
gcacaagaauaguggcuua

SEQ ID NO: 14984 - RNA, 19 nt, Artificial Sequence
  Synthetic
gcaaaggcauguugggaaa

SEQ ID NO: 14985 - RNA, 19 nt, Artificial Sequence
  Synthetic
cgaaauaaagugagaaaga

SEQ ID NO: 14986 - RNA, 19 nt, Artificial Sequence
  Synthetic
cggaagggauuuaguaaua

SEQ ID NO: 14987 - RNA, 19 nt, Artificial Sequence
  Synthetic
ggauaaaccuugagaaaug

SEQ ID NO: 14988 - RNA, 19 nt, Artificial Sequence
  Synthetic
gggacuaacuauagcacaa

SEQ ID NO: 14989 - RNA, 19 nt, Artificial Sequence
  Synthetic
acggauaaaccuugagaaa

SEQ ID NO: 14990 - RNA, 19 nt, Artificial Sequence
  Synthetic
agaaagugaggaagggaaa

SEQ ID NO: 14991 - RNA, 19 nt, Artificial Sequence
  Synthetic
gaagagaggagauggauuu

SEQ ID NO: 14992 - RNA, 19 nt, Artificial Sequence
  Synthetic
uggaagaaccucagucaaa

SEQ ID NO: 14993 - RNA, 19 nt, Artificial Sequence
  Synthetic
ugugaaagcuggaaacauu

SEQ ID NO: 14994 - RNA, 19 nt, Artificial Sequence
  Synthetic
ugaugaagaaagugaggaa

SEQ ID NO: 14995 - RNA, 19 nt, Artificial Sequence
  Synthetic
acacaaaaguggaguccua

SEQ ID NO: 14996 - RNA, 19 nt, Artificial Sequence
  Synthetic
ggaucagguucacaagaaa

SEQ ID NO: 14997 - RNA, 19 nt, Artificial Sequence
  Synthetic
uggaugaacuccugaaaga

SEQ ID NO: 14998 - RNA, 19 nt, Artificial Sequence
  Synthetic
cccgaaauaaagugagaaa

SEQ ID NO: 14999 - RNA, 19 nt, Artificial Sequence
  Synthetic
ucauaucauuggagaagua

SEQ ID NO: 15000 - RNA, 19 nt, Artificial Sequence
  Synthetic
ggagaaaguggcaaucaaa

SEQ ID NO: 15001 - RNA, 19 nt, Artificial Sequence
  Synthetic
ggaacagguccgugguuau

SEQ ID NO: 15002 - RNA, 19 nt, Artificial Sequence
  Synthetic
ugagauuucuacagcaaua

SEQ ID NO: 15003 - RNA, 19 nt, Artificial Sequence
  Synthetic
cuaaacgacuaaaggauuu

SEQ ID NO: 15004 - RNA, 19 nt, Artificial Sequence
  Synthetic
gaugaacuccugaaagaaa

SEQ ID NO: 15005 - RNA, 19 nt, Artificial Sequence
  Synthetic
cagcagaacuauuaaggca

SEQ ID NO: 15006 - RNA, 19 nt, Artificial Sequence
  Synthetic
uccagaaagcaaagaauaa

SEQ ID NO: 15007 - RNA, 19 nt, Artificial Sequence
  Synthetic
aggagaaaguggcaaucaa

SEQ ID NO: 15008 - RNA, 19 nt, Artificial Sequence
  Synthetic
ggacagauccacagagaug

SEQ ID NO: 15009 - RNA, 19 nt, Artificial Sequence
  Synthetic
ugguaaacugauaggauuu

SEQ ID NO: 15010 - RNA, 19 nt, Artificial Sequence
  Synthetic
cagucuaguacuaagauua

SEQ ID NO: 15011 - RNA, 19 nt, Artificial Sequence
  Synthetic
ggauuucaguugggaguua

SEQ ID NO: 15012 - RNA, 19 nt, Artificial Sequence
  Synthetic
caaagaacccagcaacaaa

SEQ ID NO: 15013 - RNA, 19 nt, Artificial Sequence
  Synthetic
gauaauaacuggugacaau

SEQ ID NO: 15014 - RNA, 19 nt, Artificial Sequence
  Synthetic
ugacaauagaugugaguua

SEQ ID NO: 15015 - RNA, 19 nt, Artificial Sequence
  Synthetic
gaacauugguggaaaguuu

SEQ ID NO: 15016 - RNA, 19 nt, Artificial Sequence
  Synthetic
cagaaauuacugagggaga

SEQ ID NO: 15017 - RNA, 19 nt, Artificial Sequence
  Synthetic
gagcugaacugggaagaua

SEQ ID NO: 15018 - RNA, 19 nt, Artificial Sequence
  Synthetic
ugauaugaucccagaaauu

SEQ ID NO: 15019 - RNA, 19 nt, Artificial Sequence
  Synthetic
guuuaacauugaagaguga

SEQ ID NO: 15020 - RNA, 19 nt, Artificial Sequence
  Synthetic
gaucaugcgcagggagaaa

SEQ ID NO: 15021 - RNA, 19 nt, Artificial Sequence
  Synthetic
ccacaauccuguucucuaa

SEQ ID NO: 15022 - RNA, 19 nt, Artificial Sequence
  Synthetic
caacagaccuugcacucaa

SEQ ID NO: 15023 - RNA, 19 nt, Artificial Sequence
  Synthetic
guggaaaguuugcucacaa

SEQ ID NO: 15024 - RNA, 19 nt, Artificial Sequence
  Synthetic
ugaacugggaagauaauaa

SEQ ID NO: 15025 - RNA, 19 nt, Artificial Sequence
  Synthetic
uuaaagagcuauacacuga

SEQ ID NO: 15026 - RNA, 19 nt, Artificial Sequence
  Synthetic
caucuguguuugugaguga

SEQ ID NO: 15027 - RNA, 19 nt, Artificial Sequence
  Synthetic
ugaagagugaagaggagaa

SEQ ID NO: 15028 - RNA, 19 nt, Artificial Sequence
  Synthetic
ggaaguggcuuuggaaaca

SEQ ID NO: 15029 - RNA, 19 nt, Artificial Sequence
  Synthetic
uaauaaagcugccaagcau

SEQ ID NO: 15030 - RNA, 19 nt, Artificial Sequence
  Synthetic
gggaugacgcagaccaaau

SEQ ID NO: 15031 - RNA, 19 nt, Artificial Sequence
  Synthetic
ccuuaagguuccaucagaa

SEQ ID NO: 15032 - RNA, 19 nt, Artificial Sequence
  Synthetic
gaaaaugaagacaagguua

SEQ ID NO: 15033 - RNA, 19 nt, Artificial Sequence
  Synthetic
gaagagugaagaggagaaa

SEQ ID NO: 15034 - RNA, 19 nt, Artificial Sequence
  Synthetic
gcucacaaucuuaaaugaa

SEQ ID NO: 15035 - RNA, 19 nt, Artificial Sequence
  Synthetic
gcugauaugaucccagaaa

SEQ ID NO: 15036 - RNA, 19 nt, Artificial Sequence
  Synthetic
augaagagcaugugcggau

SEQ ID NO: 15037 - RNA, 19 nt, Artificial Sequence
  Synthetic
aaagauuagccuuguacaa

SEQ ID NO: 15038 - RNA, 19 nt, Artificial Sequence
  Synthetic
gaagcuaggaggaauggaa

SEQ ID NO: 15039 - RNA, 19 nt, Artificial Sequence
  Synthetic
gacaauagaugugaguuaa

SEQ ID NO: 15040 - RNA, 19 nt, Artificial Sequence
  Synthetic
aggccuacguggagcacuu

SEQ ID NO: 15041 - RNA, 19 nt, Artificial Sequence
  Synthetic
ccugaacugaggacagaaa

SEQ ID NO: 15042 - RNA, 19 nt, Artificial Sequence
  Synthetic
cuaccuuggauguggaaga

SEQ ID NO: 15043 - RNA, 19 nt, Artificial Sequence
  Synthetic
ccauagaguuccagacaua

SEQ ID NO: 15044 - RNA, 19 nt, Artificial Sequence
  Synthetic
ccaccaagaaggagaaaca

SEQ ID NO: 15045 - RNA, 19 nt, Artificial Sequence
  Synthetic
cgagaaaggcccacaguau

SEQ ID NO: 15046 - RNA, 19 nt, Artificial Sequence
  Synthetic
ccaacuacguggaggcuau

SEQ ID NO: 15047 - RNA, 19 nt, Artificial Sequence
  Synthetic
ccauaaugacagaggcaga

SEQ ID NO: 15048 - RNA, 19 nt, Artificial Sequence
  Synthetic
cuaagaaggcagagggagu

SEQ ID NO: 15049 - RNA, 19 nt, Artificial Sequence
  Synthetic
aaaagaagcugcaggacaa

SEQ ID NO: 15050 - RNA, 19 nt, Artificial Sequence
  Synthetic
agaacaaucugcugaauga

SEQ ID NO: 15051 - RNA, 19 nt, Artificial Sequence
  Synthetic
augagaaagugcuggaaga

SEQ ID NO: 15052 - RNA, 19 nt, Artificial Sequence
  Synthetic
cuuuaaggccggagacgaa

SEQ ID NO: 15053 - RNA, 19 nt, Artificial Sequence
  Synthetic
acaaaguggacaagugcaa

SEQ ID NO: 15054 - RNA, 19 nt, Artificial Sequence
  Synthetic
caaaguaugcagagacaga

SEQ ID NO: 15055 - RNA, 19 nt, Artificial Sequence
  Synthetic
ccaagaaggccuaccauuu

SEQ ID NO: 15056 - RNA, 19 nt, Artificial Sequence
  Synthetic
ugaaugaggaccuggagaa

SEQ ID NO: 15057 - RNA, 19 nt, Artificial Sequence
  Synthetic
agaaagugcuggaagaugu

SEQ ID NO: 15058 - RNA, 19 nt, Artificial Sequence
  Synthetic
aggagaaguaugagaaagu

SEQ ID NO: 15059 - RNA, 19 nt, Artificial Sequence
  Synthetic
accaggaggugaagaacaa

SEQ ID NO: 15060 - RNA, 19 nt, Artificial Sequence
  Synthetic
agaagacacaggagaagua

SEQ ID NO: 15061 - RNA, 19 nt, Artificial Sequence
  Synthetic
gcaagcaggaugugcagaa

SEQ ID NO: 15062 - RNA, 19 nt, Artificial Sequence
  Synthetic
agaaggagaaacagccuaa

SEQ ID NO: 15063 - RNA, 19 nt, Artificial Sequence
  Synthetic
ccaagaagaugaaggagcu

SEQ ID NO: 15064 - RNA, 19 nt, Artificial Sequence
  Synthetic
gcgccagcucaucgagaaa

SEQ ID NO: 15065 - RNA, 19 nt, Artificial Sequence
  Synthetic
ggagcagguguuugagcaa

SEQ ID NO: 15066 - RNA, 19 nt, Artificial Sequence
  Synthetic
aggcagacaaggugagcga

SEQ ID NO: 15067 - RNA, 19 nt, Artificial Sequence
  Synthetic
gccagcaauuugaggaaaa

SEQ ID NO: 15068 - RNA, 19 nt, Artificial Sequence
  Synthetic
gguacaggagggugaauga

SEQ ID NO: 15069 - RNA, 19 nt, Artificial Sequence
  Synthetic
gaagauagucacauguuuu

SEQ ID NO: 15070 - RNA, 19 nt, Artificial Sequence
  Synthetic
gugcagaagacacaggaga

SEQ ID NO: 15071 - RNA, 19 nt, Artificial Sequence
  Synthetic
acaggagaaguaugagaaa

SEQ ID NO: 15072 - RNA, 19 nt, Artificial Sequence
  Synthetic
ggaagaagauagucacaug

SEQ ID NO: 15073 - RNA, 19 nt, Artificial Sequence
  Synthetic
gaagagagguucagcuaaa

SEQ ID NO: 15074 - RNA, 19 nt, Artificial Sequence
  Synthetic
cagaaauacaugagcuuua

SEQ ID NO: 15075 - RNA, 19 nt, Artificial Sequence
  Synthetic
acccaaacauugugaauua

SEQ ID NO: 15076 - RNA, 19 nt, Artificial Sequence
  Synthetic
ggagaaauuacgaagcaua

SEQ ID NO: 15077 - RNA, 19 nt, Artificial Sequence
  Synthetic
ugaauuacuuggacaguua

SEQ ID NO: 15078 - RNA, 19 nt, Artificial Sequence
  Synthetic
gguuuaugauuaaggguuu

SEQ ID NO: 15079 - RNA, 19 nt, Artificial Sequence
  Synthetic
cugagaagcagaagaagaa

SEQ ID NO: 15080 - RNA, 19 nt, Artificial Sequence
  Synthetic
ugacagauguggugacaga

SEQ ID NO: 15081 - RNA, 19 nt, Artificial Sequence
  Synthetic
gaagaaauauacacgguuu

SEQ ID NO: 15082 - RNA, 19 nt, Artificial Sequence
  Synthetic
ccaagaaagagcugauuau

SEQ ID NO: 15083 - RNA, 19 nt, Artificial Sequence
  Synthetic
caacaaagaacaaucacua

SEQ ID NO: 15084 - RNA, 19 nt, Artificial Sequence
  Synthetic
aggagaucuuggagaaauu

SEQ ID NO: 15085 - RNA, 19 nt, Artificial Sequence
  Synthetic
ccuagacauucaagacaaa

SEQ ID NO: 15086 - RNA, 19 nt, Artificial Sequence
  Synthetic
gagaagagagguucagcua

SEQ ID NO: 15087 - RNA, 19 nt, Artificial Sequence
  Synthetic
ucacuaagucggagcagaa

SEQ ID NO: 15088 - RNA, 19 nt, Artificial Sequence
  Synthetic
acagagacaucaagaguga

SEQ ID NO: 15089 - RNA, 19 nt, Artificial Sequence
  Synthetic
augaggagaucuuggagaa

SEQ ID NO: 15090 - RNA, 19 nt, Artificial Sequence
  Synthetic
cauccaacagccagaaaua

SEQ ID NO: 15091 - RNA, 19 nt, Artificial Sequence
  Synthetic
uuucagaagaugaggauga

SEQ ID NO: 15092 - RNA, 19 nt, Artificial Sequence
  Synthetic
acaguuaccucgugggaga

SEQ ID NO: 15093 - RNA, 19 nt, Artificial Sequence
  Synthetic
agacuuugauccuuggaaa

SEQ ID NO: 15094 - RNA, 19 nt, Artificial Sequence
  Synthetic
gaagagaacugcaacugaa

SEQ ID NO: 15095 - RNA, 19 nt, Artificial Sequence
  Synthetic
cagcuaaggaggcaacaaa

SEQ ID NO: 15096 - RNA, 19 nt, Artificial Sequence
  Synthetic
gagaaagagcggccagaga

SEQ ID NO: 15097 - RNA, 19 nt, Artificial Sequence
  Synthetic
gagggugguuuaugauuaa

SEQ ID NO: 15098 - RNA, 19 nt, Artificial Sequence
  Synthetic
auaagucagcugaggauua

SEQ ID NO: 15099 - RNA, 19 nt, Artificial Sequence
  Synthetic
cagaagaugaggaugauga

SEQ ID NO: 15100 - RNA, 19 nt, Artificial Sequence
  Synthetic
uacaugagcuuuacagaua

SEQ ID NO: 15101 - RNA, 19 nt, Artificial Sequence
  Synthetic
aagcagaagaagaagccua

SEQ ID NO: 15102 - RNA, 19 nt, Artificial Sequence
  Synthetic
caaagaugcuggaacccua

SEQ ID NO: 15103 - RNA, 19 nt, Artificial Sequence
  Synthetic
acggagaacuggaagauaa

SEQ ID NO: 15104 - RNA, 19 nt, Artificial Sequence
  Synthetic
cugcauaaccugaaugaaa

SEQ ID NO: 15105 - RNA, 19 nt, Artificial Sequence
  Synthetic
ugacagaggaggaggauga

SEQ ID NO: 15106 - RNA, 19 nt, Artificial Sequence
  Synthetic
aagaagcaaugaagaguaa

SEQ ID NO: 15107 - RNA, 19 nt, Artificial Sequence
  Synthetic
acacagugaagcagaaaua

SEQ ID NO: 15108 - RNA, 19 nt, Artificial Sequence
  Synthetic
augaagagauuauggagaa

SEQ ID NO: 15109 - RNA, 19 nt, Artificial Sequence
  Synthetic
ggguucagccaaagaauua

SEQ ID NO: 15110 - RNA, 19 nt, Artificial Sequence
  Synthetic
gaugacagaugaagagauu

SEQ ID NO: 15111 - RNA, 19 nt, Artificial Sequence
  Synthetic
ucaccaaacuagagcaaaa

SEQ ID NO: 15112 - RNA, 19 nt, Artificial Sequence
  Synthetic
gcacagagaaaggaaguaa

SEQ ID NO: 15113 - RNA, 19 nt, Artificial Sequence
  Synthetic
acuucagaauccagagaaa

SEQ ID NO: 15114 - RNA, 19 nt, Artificial Sequence
  Synthetic
uggaaauggauguggaaaa

SEQ ID NO: 15115 - RNA, 19 nt, Artificial Sequence
  Synthetic
acaauguacuuuugggaau

SEQ ID NO: 15116 - RNA, 19 nt, Artificial Sequence
  Synthetic
cuuuagcacuggaggcaaa

SEQ ID NO: 15117 - RNA, 19 nt, Artificial Sequence
  Synthetic
caagaagccuuuuaguaua

SEQ ID NO: 15118 - RNA, 19 nt, Artificial Sequence
  Synthetic
agaaggaacugaucauuaa

SEQ ID NO: 15119 - RNA, 19 nt, Artificial Sequence
  Synthetic
ugacagaugaagagauuau

SEQ ID NO: 15120 - RNA, 19 nt, Artificial Sequence
  Synthetic
uguuuguggucauggaaua

SEQ ID NO: 15121 - RNA, 19 nt, Artificial Sequence
  Synthetic
ugaagacaaccaagagaaa

SEQ ID NO: 15122 - RNA, 19 nt, Artificial Sequence
  Synthetic
ggaugaugaugaagagacu

SEQ ID NO: 15123 - RNA, 19 nt, Artificial Sequence
  Synthetic
ugaagagauuauggagaaa

SEQ ID NO: 15124 - RNA, 19 nt, Artificial Sequence
  Synthetic
gagcagagcaaacgcagua

SEQ ID NO: 15125 - RNA, 19 nt, Artificial Sequence
  Synthetic
ggaggaggaugaugaugaa

SEQ ID NO: 15126 - RNA, 19 nt, Artificial Sequence
  Synthetic
acaagaagccuuuuaguau

SEQ ID NO: 15127 - RNA, 19 nt, Artificial Sequence
  Synthetic
cuuuacuccuccugagaaa

SEQ ID NO: 15128 - RNA, 19 nt, Artificial Sequence
  Synthetic
acauauggucucuggguau

SEQ ID NO: 15129 - RNA, 19 nt, Artificial Sequence
  Synthetic
caaagaaggaacugaucau

SEQ ID NO: 15130 - RNA, 19 nt, Artificial Sequence
  Synthetic
aaagaaauggucugcauaa

SEQ ID NO: 15131 - RNA, 19 nt, Artificial Sequence
  Synthetic
gcauuuaucaugugugaga

SEQ ID NO: 15132 - RNA, 19 nt, Artificial Sequence
  Synthetic
gggcauuuaucauguguga

SEQ ID NO: 15133 - RNA, 19 nt, Artificial Sequence
  Synthetic
agaagaagaugaagaggaa

SEQ ID NO: 15134 - RNA, 19 nt, Artificial Sequence
  Synthetic
ccaaagaaacagucaacaa

SEQ ID NO: 15135 - RNA, 19 nt, Artificial Sequence
  Synthetic
ccaauaagaagaaggagaa

SEQ ID NO: 15136 - RNA, 19 nt, Artificial Sequence
  Synthetic
ggaagaagaagaagaagau

SEQ ID NO: 15137 - RNA, 19 nt, Artificial Sequence
  Synthetic
agacauugcaacaggacaa

SEQ ID NO: 15138 - RNA, 19 nt, Artificial Sequence
  Synthetic
aggaagaagaagaagaaga

SEQ ID NO: 15139 - RNA, 19 nt, Artificial Sequence
  Synthetic
ccauagagauauaaagagu

SEQ ID NO: 15140 - RNA, 19 nt, Artificial Sequence
  Synthetic
gacaagagguggccauaaa

SEQ ID NO: 15141 - RNA, 19 nt, Artificial Sequence
  Synthetic
cugcaaaggaagcaauuaa

SEQ ID NO: 15142 - RNA, 19 nt, Artificial Sequence
  Synthetic
ggugauccauagagauaua

SEQ ID NO: 15143 - RNA, 19 nt, Artificial Sequence
  Synthetic
auaagaagaaggagaaaga

SEQ ID NO: 15144 - RNA, 19 nt, Artificial Sequence
  Synthetic
aagaagaugaagaggaaga

SEQ ID NO: 15145 - RNA, 19 nt, Artificial Sequence
  Synthetic
caaaguaaacgaagcacua

SEQ ID NO: 15146 - RNA, 19 nt, Artificial Sequence
  Synthetic
caggugauccauagagaua

SEQ ID NO: 15147 - RNA, 19 nt, Artificial Sequence
  Synthetic
ccagaucacuccugagcaa

SEQ ID NO: 15148 - RNA, 19 nt, Artificial Sequence
  Synthetic
acacagaucggcaaagaaa

SEQ ID NO: 15149 - RNA, 19 nt, Artificial Sequence
  Synthetic
agaagaagaagaagaugaa

SEQ ID NO: 15150 - RNA, 19 nt, Artificial Sequence
  Synthetic
cagucaacaaccagaaaua

SEQ ID NO: 15151 - RNA, 19 nt, Artificial Sequence
  Synthetic
ucuggauaaugaagagaaa

SEQ ID NO: 15152 - RNA, 19 nt, Artificial Sequence
  Synthetic
aagaagaagaagaagauga

SEQ ID NO: 15153 - RNA, 19 nt, Artificial Sequence
  Synthetic
uugaaaugguggaagguga

SEQ ID NO: 15154 - RNA, 19 nt, Artificial Sequence
  Synthetic
gcuaagaagcauugugagu

SEQ ID NO: 15155 - RNA, 19 nt, Artificial Sequence
  Synthetic
gcuccagaauccugagaga

SEQ ID NO: 15156 - RNA, 19 nt, Artificial Sequence
  Synthetic
agaggaagaagaagaagaa

SEQ ID NO: 15157 - RNA, 19 nt, Artificial Sequence
  Synthetic
augaagaggaagaagaaga

SEQ ID NO: 15158 - RNA, 19 nt, Artificial Sequence
  Synthetic
agaugaagaggaagaagaa

SEQ ID NO: 15159 - RNA, 19 nt, Artificial Sequence
  Synthetic
gagaagaauaagaaagcca

SEQ ID NO: 15160 - RNA, 19 nt, Artificial Sequence
  Synthetic
cugaagagaagaauaagaa

SEQ ID NO: 15161 - RNA, 19 nt, Artificial Sequence
  Synthetic
gcgccgagccgaugaguaa

SEQ ID NO: 15162 - RNA, 19 nt, Artificial Sequence
  Synthetic
ggaagaagcggguggagau

SEQ ID NO: 15163 - RNA, 19 nt, Artificial Sequence
  Synthetic
agaaugugguggagaugua

SEQ ID NO: 15164 - RNA, 19 nt, Artificial Sequence
  Synthetic
ggauaauggugauugagau

SEQ ID NO: 15165 - RNA, 19 nt, Artificial Sequence
  Synthetic
acuaagaggugaacaugua

SEQ ID NO: 15166 - RNA, 19 nt, Artificial Sequence
  Synthetic
uggacgaguuugagaacau

SEQ ID NO: 15167 - RNA, 19 nt, Artificial Sequence
  Synthetic
acgagaaugugguggagau

SEQ ID NO: 15168 - RNA, 19 nt, Artificial Sequence
  Synthetic
cagcaaaggugccaaagau

SEQ ID NO: 15169 - RNA, 19 nt, Artificial Sequence
  Synthetic
ggaugaacgaggagcagau

SEQ ID NO: 15170 - RNA, 19 nt, Artificial Sequence
  Synthetic
gggugaagcugucagacuu

SEQ ID NO: 15171 - RNA, 19 nt, Artificial Sequence
  Synthetic
gcuccuaccuggacaacuu

SEQ ID NO: 15172 - RNA, 19 nt, Artificial Sequence
  Synthetic
agaagauggaccugcgcaa

SEQ ID NO: 15173 - RNA, 19 nt, Artificial Sequence
  Synthetic
gaucaugaauguccgaaga

SEQ ID NO: 15174 - RNA, 19 nt, Artificial Sequence
  Synthetic
guuuugaucucgugacuuu

SEQ ID NO: 15175 - RNA, 19 nt, Artificial Sequence
  Synthetic
gggauaauggugauugaga

SEQ ID NO: 15176 - RNA, 19 nt, Artificial Sequence
  Synthetic
gggacuaccagcacgagaa

SEQ ID NO: 15177 - RNA, 19 nt, Artificial Sequence
  Synthetic
uugagaugguggacggaga

SEQ ID NO: 15178 - RNA, 19 nt, Artificial Sequence
  Synthetic
ucaacgaggugguaaucau

SEQ ID NO: 15179 - RNA, 19 nt, Artificial Sequence
  Synthetic
ggacaacuucaucaagauu

SEQ ID NO: 15180 - RNA, 19 nt, Artificial Sequence
  Synthetic
gauaauggugauugagaug

SEQ ID NO: 15181 - RNA, 19 nt, Artificial Sequence
  Synthetic
ugaagaugauucgggacaa

SEQ ID NO: 15182 - RNA, 19 nt, Artificial Sequence
  Synthetic
gacugaagaaccugcacaa

SEQ ID NO: 15183 - RNA, 19 nt, Artificial Sequence
  Synthetic
aggaagaagcggguggaga

SEQ ID NO: 15184 - RNA, 19 nt, Artificial Sequence
  Synthetic
gugguaaucaugagggacu

SEQ ID NO: 15185 - RNA, 19 nt, Artificial Sequence
  Synthetic
ucuucaacgaggugguaau

SEQ ID NO: 15186 - RNA, 19 nt, Artificial Sequence
  Synthetic
gcagcaaaggugccaaaga

SEQ ID NO: 15187 - RNA, 19 nt, Artificial Sequence
  Synthetic
ggugaagcugucagacuuu

SEQ ID NO: 15188 - RNA, 19 nt, Artificial Sequence
  Synthetic
ucgaccagcacgagcagaa

SEQ ID NO: 15189 - RNA, 19 nt, Artificial Sequence
  Synthetic
uggagauguacaacagcua

SEQ ID NO: 15190 - RNA, 19 nt, Artificial Sequence
  Synthetic
gcaagcugguggccgucaa

SEQ ID NO: 15191 - RNA, 19 nt, Artificial Sequence
  Synthetic
ggacagagacacagcaaga

SEQ ID NO: 15192 - RNA, 19 nt, Artificial Sequence
  Synthetic
ggugaggagucgcgaggaa

SEQ ID NO: 15193 - RNA, 19 nt, Artificial Sequence
  Synthetic
agacaggaauguaaggauu

SEQ ID NO: 15194 - RNA, 19 nt, Artificial Sequence
  Synthetic
gggugaagcucucggacuu

SEQ ID NO: 15195 - RNA, 19 nt, Artificial Sequence
  Synthetic
ucaacgagguggugaucau

SEQ ID NO: 15196 - RNA, 19 nt, Artificial Sequence
  Synthetic
ucaacgugguggagaugua

SEQ ID NO: 15197 - RNA, 19 nt, Artificial Sequence
  Synthetic
ccucugaccacuucggaua

SEQ ID NO: 15198 - RNA, 19 nt, Artificial Sequence
  Synthetic
ccaaugggcuggcugcaaa

SEQ ID NO: 15199 - RNA, 19 nt, Artificial Sequence
  Synthetic
gaagaaacgcccugagauc

SEQ ID NO: 15200 - RNA, 19 nt, Artificial Sequence
  Synthetic
uggagauguacaagagcua

SEQ ID NO: 15201 - RNA, 19 nt, Artificial Sequence
  Synthetic
gagagaacaucgugugugu

SEQ ID NO: 15202 - RNA, 19 nt, Artificial Sequence
  Synthetic
ccucagcgccuaagagaga

SEQ ID NO: 15203 - RNA, 19 nt, Artificial Sequence
  Synthetic
cuucagggcugcugugaga

SEQ ID NO: 15204 - RNA, 19 nt, Artificial Sequence
  Synthetic
gggcuugacaggaguuuau

SEQ ID NO: 15205 - RNA, 19 nt, Artificial Sequence
  Synthetic
ugauccagcucuaccgaaa

SEQ ID NO: 15206 - RNA, 19 nt, Artificial Sequence
  Synthetic
augaagaggcuccgggaca

SEQ ID NO: 15207 - RNA, 19 nt, Artificial Sequence
  Synthetic
acuucaacgugguggagau

SEQ ID NO: 15208 - RNA, 19 nt, Artificial Sequence
  Synthetic
aggauuggcaacuguguua

SEQ ID NO: 15209 - RNA, 19 nt, Artificial Sequence
  Synthetic
agagcuaccuggugggcga

SEQ ID NO: 15210 - RNA, 19 nt, Artificial Sequence
  Synthetic
gagacuuccuggagcggau

SEQ ID NO: 15211 - RNA, 19 nt, Artificial Sequence
  Synthetic
cugcuggucuccacagaua

SEQ ID NO: 15212 - RNA, 19 nt, Artificial Sequence
  Synthetic
gccagagacaggaauguaa

SEQ ID NO: 15213 - RNA, 19 nt, Artificial Sequence
  Synthetic
gaagugaucuccaggucuu

SEQ ID NO: 15214 - RNA, 19 nt, Artificial Sequence
  Synthetic
ccaaagauugaaaugugaa

SEQ ID NO: 15215 - RNA, 19 nt, Artificial Sequence
  Synthetic
ccaccgacccagacaugua

SEQ ID NO: 15216 - RNA, 19 nt, Artificial Sequence
  Synthetic
ucaacgacauccagaaguu

SEQ ID NO: 15217 - RNA, 19 nt, Artificial Sequence
  Synthetic
auccagaaguugucaguca

SEQ ID NO: 15218 - RNA, 19 nt, Artificial Sequence
  Synthetic
aaagaaauugcaaggacuu

SEQ ID NO: 15219 - RNA, 19 nt, Artificial Sequence
  Synthetic
gaccauguuccgcaagaaa

SEQ ID NO: 15220 - RNA, 19 nt, Artificial Sequence
  Synthetic
agaaaaggcugcugugguu

SEQ ID NO: 15221 - RNA, 19 nt, Artificial Sequence
  Synthetic
cgagaaacacacagggaaa

SEQ ID NO: 15222 - RNA, 19 nt, Artificial Sequence
  Synthetic
ggaaaugccuccauaaaua

SEQ ID NO: 15223 - RNA, 19 nt, Artificial Sequence
  Synthetic
ggaaauacacuguggugaa

SEQ ID NO: 15224 - RNA, 19 nt, Artificial Sequence
  Synthetic
ccacaagagcagaaguuua

SEQ ID NO: 15225 - RNA, 19 nt, Artificial Sequence
  Synthetic
gaugaggacaugagaauaa

SEQ ID NO: 15226 - RNA, 19 nt, Artificial Sequence
  Synthetic
gaagaagaauuaagaguga

SEQ ID NO: 15227 - RNA, 19 nt, Artificial Sequence
  Synthetic
ggauaaaguugucugauuu

SEQ ID NO: 15228 - RNA, 19 nt, Artificial Sequence
  Synthetic
ccucaaagucaaagcaaau

SEQ ID NO: 15229 - RNA, 19 nt, Artificial Sequence
  Synthetic
ugaauuagcaagaggguau

SEQ ID NO: 15230 - RNA, 19 nt, Artificial Sequence
  Synthetic
cggauaaaguugucugauu

SEQ ID NO: 15231 - RNA, 19 nt, Artificial Sequence
  Synthetic
ggaaacaaguugcagugaa

SEQ ID NO: 15232 - RNA, 19 nt, Artificial Sequence
  Synthetic
ggaugaauuugcauguuaa

SEQ ID NO: 15233 - RNA, 19 nt, Artificial Sequence
  Synthetic
uggaagagcuacauaguca

SEQ ID NO: 15234 - RNA, 19 nt, Artificial Sequence
  Synthetic
ugacagacauugugacuca

SEQ ID NO: 15235 - RNA, 19 nt, Artificial Sequence
  Synthetic
aaacaaacccugcaaggaa

SEQ ID NO: 15236 - RNA, 19 nt, Artificial Sequence
  Synthetic
gagcaaaccaagugaauac

SEQ ID NO: 15237 - RNA, 19 nt, Artificial Sequence
  Synthetic
gggaauacuuggccaacuu

SEQ ID NO: 15238 - RNA, 19 nt, Artificial Sequence
  Synthetic
caaacuaccucaaagucaa

SEQ ID NO: 15239 - RNA, 19 nt, Artificial Sequence
  Synthetic
aaacagaggcuuuucuuaa

SEQ ID NO: 15240 - RNA, 19 nt, Artificial Sequence
  Synthetic
ggacuauguagaaguagaa

SEQ ID NO: 15241 - RNA, 19 nt, Artificial Sequence
  Synthetic
aggguaacauguaggauuu

SEQ ID NO: 15242 - RNA, 19 nt, Artificial Sequence
  Synthetic
ccagaaugaaugaagaaca

SEQ ID NO: 15243 - RNA, 19 nt, Artificial Sequence
  Synthetic
ccuaugaagacaaucguua

SEQ ID NO: 15244 - RNA, 19 nt, Artificial Sequence
  Synthetic
agacaaucguuagaggaaa

SEQ ID NO: 15245 - RNA, 19 nt, Artificial Sequence
  Synthetic
acaccaaacucuugucuau

SEQ ID NO: 15246 - RNA, 19 nt, Artificial Sequence
  Synthetic
gcgaaaaguugcagaauag

SEQ ID NO: 15247 - RNA, 19 nt, Artificial Sequence
  Synthetic
gggauuaccaccaugacaa

SEQ ID NO: 15248 - RNA, 19 nt, Artificial Sequence
  Synthetic
gaaacaaguugcagugaag

SEQ ID NO: 15249 - RNA, 19 nt, Artificial Sequence
  Synthetic
aagacaaucguuagaggaa

SEQ ID NO: 15250 - RNA, 19 nt, Artificial Sequence
  Synthetic
caaacuccguuaugauaua

SEQ ID NO: 15251 - RNA, 19 nt, Artificial Sequence
  Synthetic
cuacagagguugacagcua

SEQ ID NO: 15252 - RNA, 19 nt, Artificial Sequence
  Synthetic
gcgagagaauuuacagaaa

SEQ ID NO: 15253 - RNA, 19 nt, Artificial Sequence
  Synthetic
ccauggaacuggugacaau

SEQ ID NO: 15254 - RNA, 19 nt, Artificial Sequence
  Synthetic
aaaacaagguugcgaguaa

SEQ ID NO: 15255 - RNA, 19 nt, Artificial Sequence
  Synthetic
caacaaagauucugauaac

SEQ ID NO: 15256 - RNA, 19 nt, Artificial Sequence
  Synthetic
ggaucaaccuccaggcuga

SEQ ID NO: 15257 - RNA, 19 nt, Artificial Sequence
  Synthetic
ccaacaaagauucugauaa

SEQ ID NO: 15258 - RNA, 19 nt, Artificial Sequence
  Synthetic
ggauacagaaaucaaguaa

SEQ ID NO: 15259 - RNA, 19 nt, Artificial Sequence
  Synthetic
ccuacuucaccaagagaaa

SEQ ID NO: 15260 - RNA, 19 nt, Artificial Sequence
  Synthetic
aguaaauuguguuggaguu

SEQ ID NO: 15261 - RNA, 19 nt, Artificial Sequence
  Synthetic
augcagagaaugacuaaua

SEQ ID NO: 15262 - RNA, 19 nt, Artificial Sequence
  Synthetic
gauacaagucucacagauu

SEQ ID NO: 15263 - RNA, 19 nt, Artificial Sequence
  Synthetic
uggcaggaauucagcgaga

SEQ ID NO: 15264 - RNA, 19 nt, Artificial Sequence
  Synthetic
gguuuggcaugucgaguua

SEQ ID NO: 15265 - RNA, 19 nt, Artificial Sequence
  Synthetic
cgacaggagcugaucaaca

SEQ ID NO: 15266 - RNA, 19 nt, Artificial Sequence
  Synthetic
gcuagaugcuggugugcca

SEQ ID NO: 15267 - RNA, 19 nt, Artificial Sequence
  Synthetic
cauuaagacugauggguaa

SEQ ID NO: 15268 - RNA, 19 nt, Artificial Sequence
  Synthetic
ccaugaagcugcuggcaua

SEQ ID NO: 15269 - RNA, 19 nt, Artificial Sequence
  Synthetic
guucauaucaggagauuua

SEQ ID NO: 15270 - RNA, 19 nt, Artificial Sequence
  Synthetic
gaauaugaauggcagcaaa

SEQ ID NO: 15271 - RNA, 19 nt, Artificial Sequence
  Synthetic
uaauacugcuuaugggaaa

SEQ ID NO: 15272 - RNA, 19 nt, Artificial Sequence
  Synthetic
gaguuguguuuguuggaaa

SEQ ID NO: 15273 - RNA, 19 nt, Artificial Sequence
  Synthetic
agaugaaccugcuggauuu

SEQ ID NO: 15274 - RNA, 19 nt, Artificial Sequence
  Synthetic
gagaagacugaauguguua

SEQ ID NO: 15275 - RNA, 19 nt, Artificial Sequence
  Synthetic
cgaagaggagcaagaggaa

SEQ ID NO: 15276 - RNA, 19 nt, Artificial Sequence
  Synthetic
uggagaaccugaagagcau

SEQ ID NO: 15277 - RNA, 19 nt, Artificial Sequence
  Synthetic
agcaagaggaaguggagaa

SEQ ID NO: 15278 - RNA, 19 nt, Artificial Sequence
  Synthetic
aaauaaagacgccggagaa

SEQ ID NO: 15279 - RNA, 19 nt, Artificial Sequence
  Synthetic
ggacggaagccaagccauu

SEQ ID NO: 15280 - RNA, 19 nt, Artificial Sequence
  Synthetic
uuuuggaacaugaggguua

SEQ ID NO: 15281 - RNA, 19 nt, Artificial Sequence
  Synthetic
cuacaaaucuggcauguuu

SEQ ID NO: 15282 - RNA, 19 nt, Artificial Sequence
  Synthetic
agaaggaccugauauguaa

SEQ ID NO: 15283 - RNA, 19 nt, Artificial Sequence
  Synthetic
caacaugaugaguaaagaa

SEQ ID NO: 15284 - RNA, 19 nt, Artificial Sequence
  Synthetic
cagcaccaauguugauaaa

SEQ ID NO: 15285 - RNA, 19 nt, Artificial Sequence
  Synthetic
uugauaaacuggugaagga

SEQ ID NO: 15286 - RNA, 19 nt, Artificial Sequence
  Synthetic
ccguguacuccaaggacaa

SEQ ID NO: 15287 - RNA, 19 nt, Artificial Sequence
  Synthetic
gcaccaauguugauaaacu

SEQ ID NO: 15288 - RNA, 19 nt, Artificial Sequence
  Synthetic
gaaugagaacauagacaga

SEQ ID NO: 15289 - RNA, 19 nt, Artificial Sequence
  Synthetic
gaccauguguggacgcaaa

SEQ ID NO: 15290 - RNA, 19 nt, Artificial Sequence
  Synthetic
cagccgaagaggagcaaga

SEQ ID NO: 15291 - RNA, 19 nt, Artificial Sequence
  Synthetic
acggcaagccagaauguua

SEQ ID NO: 15292 - RNA, 19 nt, Artificial Sequence
  Synthetic
gaucuaaagcucuugaaaa

SEQ ID NO: 15293 - RNA, 19 nt, Artificial Sequence
  Synthetic
guggaacgcugguuaaauu

SEQ ID NO: 15294 - RNA, 19 nt, Artificial Sequence
  Synthetic
uuggcaacaugaugaguaa

SEQ ID NO: 15295 - RNA, 19 nt, Artificial Sequence
  Synthetic
ucaaauucgaagaggacuu

SEQ ID NO: 15296 - RNA, 19 nt, Artificial Sequence
  Synthetic
gaucuuguguauugagcuu

SEQ ID NO: 15297 - RNA, 19 nt, Artificial Sequence
  Synthetic
ucaaaugggcagagauaaa

SEQ ID NO: 15298 - RNA, 19 nt, Artificial Sequence
  Synthetic
cugaagaagaagaggaaga

SEQ ID NO: 15299 - RNA, 19 nt, Artificial Sequence
  Synthetic
uggcauaugcuuuggauua

SEQ ID NO: 15300 - RNA, 19 nt, Artificial Sequence
  Synthetic
gcaguauauuccaaagaua

SEQ ID NO: 15301 - RNA, 19 nt, Artificial Sequence
  Synthetic
gcauuaagccuguguguga

SEQ ID NO: 15302 - RNA, 19 nt, Artificial Sequence
  Synthetic
aggaagaaguggaaagucu

SEQ ID NO: 15303 - RNA, 19 nt, Artificial Sequence
  Synthetic
agacaucacugcugaagaa

SEQ ID NO: 15304 - RNA, 19 nt, Artificial Sequence
  Synthetic
gcaccaaaguggauaaacu

SEQ ID NO: 15305 - RNA, 19 nt, Artificial Sequence
  Synthetic
uuucggaacacgaggguua

SEQ ID NO: 15306 - RNA, 19 nt, Artificial Sequence
  Synthetic
gcgagaggcugucaguaaa

SEQ ID NO: 15307 - RNA, 19 nt, Artificial Sequence
  Synthetic
caucacugcugaagaagaa

SEQ ID NO: 15308 - RNA, 19 nt, Artificial Sequence
  Synthetic
ucaauauggucuuggcaau

SEQ ID NO: 15309 - RNA, 19 nt, Artificial Sequence
  Synthetic
uuggaaacaugaugagcaa

SEQ ID NO: 15310 - RNA, 19 nt, Artificial Sequence
  Synthetic
agaaaggacagguguauuu

SEQ ID NO: 15311 - RNA, 19 nt, Artificial Sequence
  Synthetic
uggauaaacuaguacgaga

SEQ ID NO: 15312 - RNA, 19 nt, Artificial Sequence
  Synthetic
ggauaaacuaguacgagau

SEQ ID NO: 15313 - RNA, 19 nt, Artificial Sequence
  Synthetic
aggugguauuuguuggaaa

SEQ ID NO: 15314 - RNA, 19 nt, Artificial Sequence
  Synthetic
gauaauuacaaacggguca

SEQ ID NO: 15315 - RNA, 19 nt, Artificial Sequence
  Synthetic
ggcaaucaucugugcauua

SEQ ID NO: 15316 - RNA, 19 nt, Artificial Sequence
  Synthetic
guauauaaguugccugcuu

SEQ ID NO: 15317 - RNA, 19 nt, Artificial Sequence
  Synthetic
gcuuaugggucuacaggca

SEQ ID NO: 15318 - RNA, 19 nt, Artificial Sequence
  Synthetic
agcgagaggcugucaguaa

SEQ ID NO: 15319 - RNA, 19 nt, Artificial Sequence
  Synthetic
gguuaauuguguaccugaa

SEQ ID NO: 15320 - RNA, 19 nt, Artificial Sequence
  Synthetic
uugcaaacuggaugaacua

SEQ ID NO: 15321 - RNA, 19 nt, Artificial Sequence
  Synthetic
gguuagcaucuuagcagua

SEQ ID NO: 15322 - RNA, 19 nt, Artificial Sequence
  Synthetic
gauaaacuaguacgagaua

SEQ ID NO: 15323 - RNA, 19 nt, Artificial Sequence
  Synthetic
uggucaagcugguauauuu

SEQ ID NO: 15324 - RNA, 19 nt, Artificial Sequence
  Synthetic
agaagaggaagaaguggaa

SEQ ID NO: 15325 - RNA, 19 nt, Artificial Sequence
  Synthetic
gaggauuugcuguauauaa

SEQ ID NO: 15326 - RNA, 19 nt, Artificial Sequence
  Synthetic
gaacuagauugcuugauca

SEQ ID NO: 15327 - RNA, 19 nt, Artificial Sequence
  Synthetic
aagaagaaguugagaguuu

SEQ ID NO: 15328 - RNA, 19 nt, Artificial Sequence
  Synthetic
ccaaaugggaagagauaaa

SEQ ID NO: 15329 - RNA, 19 nt, Artificial Sequence
  Synthetic
gaucaaagaugccaagaaa

SEQ ID NO: 15330 - RNA, 19 nt, Artificial Sequence
  Synthetic
caaugaaacuuuuggcaua

SEQ ID NO: 15331 - RNA, 19 nt, Artificial Sequence
  Synthetic
guauauagccaguguuaaa

SEQ ID NO: 15332 - RNA, 19 nt, Artificial Sequence
  Synthetic
gcgagaaucuguuaguaaa

SEQ ID NO: 15333 - RNA, 19 nt, Artificial Sequence
  Synthetic
cagcagaggaagagcaaga

SEQ ID NO: 15334 - RNA, 19 nt, Artificial Sequence
  Synthetic
guacauagggauaguggaa

SEQ ID NO: 15335 - RNA, 19 nt, Artificial Sequence
  Synthetic
uggcauaugcacuggauua

SEQ ID NO: 15336 - RNA, 19 nt, Artificial Sequence
  Synthetic
ccuucaaccuuaagauuua

SEQ ID NO: 15337 - RNA, 19 nt, Artificial Sequence
  Synthetic
gaagagaggcugaguguca

SEQ ID NO: 15338 - RNA, 19 nt, Artificial Sequence
  Synthetic
guaaagggcuugcuguaua

SEQ ID NO: 15339 - RNA, 19 nt, Artificial Sequence
  Synthetic
gcaucuaguuuugggaaua

SEQ ID NO: 15340 - RNA, 19 nt, Artificial Sequence
  Synthetic
ggugagaccugauaacuaa

SEQ ID NO: 15341 - RNA, 19 nt, Artificial Sequence
  Synthetic
gguccaaacuccauuuaua

SEQ ID NO: 15342 - RNA, 19 nt, Artificial Sequence
  Synthetic
gcaagaagaaguugagagu

SEQ ID NO: 15343 - RNA, 19 nt, Artificial Sequence
  Synthetic
cggaaauauuugacuucua

SEQ ID NO: 15344 - RNA, 19 nt, Artificial Sequence
  Synthetic
uguaggaaguugugucuua

SEQ ID NO: 15345 - RNA, 19 nt, Artificial Sequence
  Synthetic
gcacaaacuggaugaacuu

SEQ ID NO: 15346 - RNA, 19 nt, Artificial Sequence
  Synthetic
aaauagaggugcaguuaga

SEQ ID NO: 15347 - RNA, 19 nt, Artificial Sequence
  Synthetic
uggaggagauuaugaaaga

SEQ ID NO: 15348 - RNA, 19 nt, Artificial Sequence
  Synthetic
uucuagaacaugaggguua

SEQ ID NO: 15349 - RNA, 19 nt, Artificial Sequence
  Synthetic
aaaggaagauugagcaaca

SEQ ID NO: 15350 - RNA, 19 nt, Artificial Sequence
  Synthetic
ugucuaacuuggaaaggua

SEQ ID NO: 15351 - RNA, 19 nt, Artificial Sequence
  Synthetic
gcucaaacacaaaucuuaa

SEQ ID NO: 15352 - RNA, 19 nt, Artificial Sequence
  Synthetic
gaggagauuaugaaagauu

SEQ ID NO: 15353 - RNA, 19 nt, Artificial Sequence
  Synthetic
ggacaagccgagugcuauu

SEQ ID NO: 15354 - RNA, 19 nt, Artificial Sequence
  Synthetic
cagcagaggcaauguuauu

SEQ ID NO: 15355 - RNA, 19 nt, Artificial Sequence
  Synthetic
gcuaauaaaugucauccaa

SEQ ID NO: 15356 - RNA, 19 nt, Artificial Sequence
  Synthetic
gcacuggauuacuggucaa

SEQ ID NO: 15357 - RNA, 19 nt, Artificial Sequence
  Synthetic
cggcagaaguacuggaaca

SEQ ID NO: 15358 - RNA, 19 nt, Artificial Sequence
  Synthetic
gcgaguggcuucagagauu

SEQ ID NO: 15359 - RNA, 19 nt, Artificial Sequence
  Synthetic
ccaaagaagacauggcgaa

SEQ ID NO: 15360 - RNA, 19 nt, Artificial Sequence
  Synthetic
uugaagaagcaaagaggaa

SEQ ID NO: 15361 - RNA, 19 nt, Artificial Sequence
  Synthetic
ggacacagaacgugaacau

SEQ ID NO: 15362 - RNA, 19 nt, Artificial Sequence
  Synthetic
aagaggaaguuacaagaaa

SEQ ID NO: 15363 - RNA, 19 nt, Artificial Sequence
  Synthetic
ccuuaauuuucgcagauaa

SEQ ID NO: 15364 - RNA, 19 nt, Artificial Sequence
  Synthetic
cgcagauaacaguggaaua

SEQ ID NO: 15365 - RNA, 19 nt, Artificial Sequence
  Synthetic
agagagaucuauacaggua

SEQ ID NO: 15366 - RNA, 19 nt, Artificial Sequence
  Synthetic
gaagagaagcugcggcuga

SEQ ID NO: 15367 - RNA, 19 nt, Artificial Sequence
  Synthetic
ggaacaagcuucagacccu

SEQ ID NO: 15368 - RNA, 19 nt, Artificial Sequence
  Synthetic
ccgagagggcggagaaguu

SEQ ID NO: 15369 - RNA, 19 nt, Artificial Sequence
  Synthetic
gcgcggaucugguggucau

SEQ ID NO: 15370 - RNA, 19 nt, Artificial Sequence
  Synthetic
ggugcaacuucgugcucaa

SEQ ID NO: 15371 - RNA, 19 nt, Artificial Sequence
  Synthetic
acacagaacgugaacauga

SEQ ID NO: 15372 - RNA, 19 nt, Artificial Sequence
  Synthetic
gaagaagcaaagaggaagu

SEQ ID NO: 15373 - RNA, 19 nt, Artificial Sequence
  Synthetic
gaggaaguuacaagaaaga

SEQ ID NO: 15374 - RNA, 19 nt, Artificial Sequence
  Synthetic
gcgaagagccugcugcaca

SEQ ID NO: 15375 - RNA, 19 nt, Artificial Sequence
  Synthetic
auucaacgguacagcacaa

SEQ ID NO: 15376 - RNA, 19 nt, Artificial Sequence
  Synthetic
ccgacgagaucuuccgcaa

SEQ ID NO: 15377 - RNA, 19 nt, Artificial Sequence
  Synthetic
cgaagaaguuugacgagcu

SEQ ID NO: 15378 - RNA, 19 nt, Artificial Sequence
  Synthetic
ucgugaagguggagacgga

SEQ ID NO: 15379 - RNA, 19 nt, Artificial Sequence
  Synthetic
ugaaaggagcugagcagga

SEQ ID NO: 15380 - RNA, 19 nt, Artificial Sequence
  Synthetic
gaaacugcguucaaaucaa

SEQ ID NO: 15381 - RNA, 19 nt, Artificial Sequence
  Synthetic
ccucauaaaugugccuuaa

SEQ ID NO: 15382 - RNA, 19 nt, Artificial Sequence
  Synthetic
gcaaagaggaaguuacaag

SEQ ID NO: 15383 - RNA, 19 nt, Artificial Sequence
  Synthetic
cuaugagauuucaguucaa

SEQ ID NO: 15384 - RNA, 19 nt, Artificial Sequence
  Synthetic
gaaaggacacagaacguga

SEQ ID NO: 15385 - RNA, 19 nt, Artificial Sequence
  Synthetic
gcuacuccuuagagggaca

SEQ ID NO: 15386 - RNA, 19 nt, Artificial Sequence
  Synthetic
cggaaaggacacagaacgu

SEQ ID NO: 15387 - RNA, 19 nt, Artificial Sequence
  Synthetic
cuacaaauccuuggagaaa

SEQ ID NO: 15388 - RNA, 19 nt, Artificial Sequence
  Synthetic
ggacaaaggaugacgaugu

SEQ ID NO: 15389 - RNA, 19 nt, Artificial Sequence
  Synthetic
ccaugaagacuuugaauuu

SEQ ID NO: 15390 - RNA, 19 nt, Artificial Sequence
  Synthetic
cuacugagcuaaagcagaa

SEQ ID NO: 15391 - RNA, 19 nt, Artificial Sequence
  Synthetic
gguuuaaucacuuuggaaa

SEQ ID NO: 15392 - RNA, 19 nt, Artificial Sequence
  Synthetic
ucaugaaggugcaaguuua

SEQ ID NO: 15393 - RNA, 19 nt, Artificial Sequence
  Synthetic
caggagaaauuaaagguuu

SEQ ID NO: 15394 - RNA, 19 nt, Artificial Sequence
  Synthetic
ggaucgaguuuauuggaau

SEQ ID NO: 15395 - RNA, 19 nt, Artificial Sequence
  Synthetic
ggaccgugcugacagaaua

SEQ ID NO: 15396 - RNA, 19 nt, Artificial Sequence
  Synthetic
ugucaaaggacucuacaaa

SEQ ID NO: 15397 - RNA, 19 nt, Artificial Sequence
  Synthetic
ggaugcaucuuaugaagua

SEQ ID NO: 15398 - RNA, 19 nt, Artificial Sequence
  Synthetic
acuacaaauccuuggagaa

SEQ ID NO: 15399 - RNA, 19 nt, Artificial Sequence
  Synthetic
agaaagucaaacugagcaa

SEQ ID NO: 15400 - RNA, 19 nt, Artificial Sequence
  Synthetic
gaacaaggagauuggcuga

SEQ ID NO: 15401 - RNA, 19 nt, Artificial Sequence
  Synthetic
gccaagucauggugccaaa

SEQ ID NO: 15402 - RNA, 19 nt, Artificial Sequence
  Synthetic
aaacagaugcggaaacauu

SEQ ID NO: 15403 - RNA, 19 nt, Artificial Sequence
  Synthetic
gaacuauaugugccagaaa

SEQ ID NO: 15404 - RNA, 19 nt, Artificial Sequence
  Synthetic
gcaaauucaugaaggugca

SEQ ID NO: 15405 - RNA, 19 nt, Artificial Sequence
  Synthetic
ucgucaaggucucaauaaa

SEQ ID NO: 15406 - RNA, 19 nt, Artificial Sequence
  Synthetic
aaagucaagcugagcaaua

SEQ ID NO: 15407 - RNA, 19 nt, Artificial Sequence
  Synthetic
ggaggaaggaguucugaau

SEQ ID NO: 15408 - RNA, 19 nt, Artificial Sequence
  Synthetic
cugaagacagagaagagaa

SEQ ID NO: 15409 - RNA, 19 nt, Artificial Sequence
  Synthetic
gcugauuggaggagaucuu

SEQ ID NO: 15410 - RNA, 19 nt, Artificial Sequence
  Synthetic
ugaagacagagaagagaau

SEQ ID NO: 15411 - RNA, 19 nt, Artificial Sequence
  Synthetic
uuaagauggugauggaaca

SEQ ID NO: 15412 - RNA, 19 nt, Artificial Sequence
  Synthetic
gcaggauacccauaagcaa

SEQ ID NO: 15413 - RNA, 19 nt, Artificial Sequence
  Synthetic
gcauggccuuggaggagua

SEQ ID NO: 15414 - RNA, 19 nt, Artificial Sequence
  Synthetic
aaagucaaacugagcaaua

SEQ ID NO: 15415 - RNA, 19 nt, Artificial Sequence
  Synthetic
cgcaacaaugcaaggcaaa

SEQ ID NO: 15416 - RNA, 19 nt, Artificial Sequence
  Synthetic
gugccaaagugcugacgau

SEQ ID NO: 15417 - RNA, 19 nt, Artificial Sequence
  Synthetic
cgcaaaggaucgugagaau

SEQ ID NO: 15418 - RNA, 19 nt, Artificial Sequence
  Synthetic
cugaagugcucuuugauua

SEQ ID NO: 15419 - RNA, 19 nt, Artificial Sequence
  Synthetic
ggauguaccguguggcuaa

SEQ ID NO: 15420 - RNA, 19 nt, Artificial Sequence
  Synthetic
gcucaaacagaaauguaaa

SEQ ID NO: 15421 - RNA, 19 nt, Artificial Sequence
  Synthetic
caggaauaagagagggcaa

SEQ ID NO: 15422 - RNA, 19 nt, Artificial Sequence
  Synthetic
guaaagaaaugaaugcuga

SEQ ID NO: 15423 - RNA, 19 nt, Artificial Sequence
  Synthetic
ggagaaaauaagauggaau

SEQ ID NO: 15424 - RNA, 19 nt, Artificial Sequence
  Synthetic
ccaagaaggaucuguauga

SEQ ID NO: 15425 - RNA, 19 nt, Artificial Sequence
  Synthetic
cguaaaaggccucuauaaa

SEQ ID NO: 15426 - RNA, 19 nt, Artificial Sequence
  Synthetic
ccucuagacuggcggauga

SEQ ID NO: 15427 - RNA, 19 nt, Artificial Sequence
  Synthetic
cgucauggccuuaacagaa

SEQ ID NO: 15428 - RNA, 19 nt, Artificial Sequence
  Synthetic
gugaaagcagagacguaaa

SEQ ID NO: 15429 - RNA, 19 nt, Artificial Sequence
  Synthetic
ggaccaaggaugacgaugu

SEQ ID NO: 15430 - RNA, 19 nt, Artificial Sequence
  Synthetic
cauggaagguccugacaga

SEQ ID NO: 15431 - RNA, 19 nt, Artificial Sequence
  Synthetic
ggaagguccugacagauua

SEQ ID NO: 15432 - RNA, 19 nt, Artificial Sequence
  Synthetic
aggaguacuuacagguuau

SEQ ID NO: 15433 - RNA, 19 nt, Artificial Sequence
  Synthetic
ggagaagaacuaagccuuu

SEQ ID NO: 15434 - RNA, 19 nt, Artificial Sequence
  Synthetic
aaucaaagauauccacgaa

SEQ ID NO: 15435 - RNA, 19 nt, Artificial Sequence
  Synthetic
caccaugugagcaggaaua

SEQ ID NO: 15436 - RNA, 19 nt, Artificial Sequence
  Synthetic
guaaaaggccucuauaaaa

SEQ ID NO: 15437 - RNA, 19 nt, Artificial Sequence
  Synthetic
ccgcaaaauacaugaauca

SEQ ID NO: 15438 - RNA, 19 nt, Artificial Sequence
  Synthetic
agacggagaaccagcagaa

SEQ ID NO: 15439 - RNA, 19 nt, Artificial Sequence
  Synthetic
augaugggcuggaccaaua

SEQ ID NO: 15440 - RNA, 19 nt, Artificial Sequence
  Synthetic
uugugaaagcagagacgua

SEQ ID NO: 15441 - RNA, 19 nt, Artificial Sequence
  Synthetic
aaggaguacuuacagguua

SEQ ID NO: 15442 - RNA, 19 nt, Artificial Sequence
  Synthetic
gcgcaauccuguccacaau

SEQ ID NO: 15443 - RNA, 19 nt, Artificial Sequence
  Synthetic
uggaagguccugacagauu

SEQ ID NO: 15444 - RNA, 19 nt, Artificial Sequence
  Synthetic
acgcugaauucuaugaaca

SEQ ID NO: 15445 - RNA, 19 nt, Artificial Sequence
  Synthetic
gauuaugagaaaccugaaa

SEQ ID NO: 15446 - RNA, 19 nt, Artificial Sequence
  Synthetic
gcaaguuuguccuggcaca

SEQ ID NO: 15447 - RNA, 19 nt, Artificial Sequence
  Synthetic
cagaagaacuggagaaaua

SEQ ID NO: 15448 - RNA, 19 nt, Artificial Sequence
  Synthetic
gcagcaagcgacagagaaa

SEQ ID NO: 15449 - RNA, 19 nt, Artificial Sequence
  Synthetic
agacggagcuccugggcaa

SEQ ID NO: 15450 - RNA, 19 nt, Artificial Sequence
  Synthetic
acaaggaggugguggugaa

SEQ ID NO: 15451 - RNA, 19 nt, Artificial Sequence
  Synthetic
gaagagguguuucgaguaa

SEQ ID NO: 15452 - RNA, 19 nt, Artificial Sequence
  Synthetic
ucaucaagguauuggauau

SEQ ID NO: 15453 - RNA, 19 nt, Artificial Sequence
  Synthetic
uggagaagcuggugacaga

SEQ ID NO: 15454 - RNA, 19 nt, Artificial Sequence
  Synthetic
gagaggaaccuguggcaau

SEQ ID NO: 15455 - RNA, 19 nt, Artificial Sequence
  Synthetic
ccaaagaacucaugagccu

SEQ ID NO: 15456 - RNA, 19 nt, Artificial Sequence
  Synthetic
cgacaaagcuugcgggcuc

SEQ ID NO: 15457 - RNA, 19 nt, Artificial Sequence
  Synthetic
auuagaagcuggauuguaa

SEQ ID NO: 15458 - RNA, 19 nt, Artificial Sequence
  Synthetic
cgaguaaacaagccagaaa

SEQ ID NO: 15459 - RNA, 19 nt, Artificial Sequence
  Synthetic
ucaaauuguuccugugcua

SEQ ID NO: 15460 - RNA, 19 nt, Artificial Sequence
  Synthetic
gggaagagguguuucgagu

SEQ ID NO: 15461 - RNA, 19 nt, Artificial Sequence
  Synthetic
aggagaaggucuuggagga

SEQ ID NO: 15462 - RNA, 19 nt, Artificial Sequence
  Synthetic
ggaaggaugaggccagaua

SEQ ID NO: 15463 - RNA, 19 nt, Artificial Sequence
  Synthetic
gguaacucguguuggguuu

SEQ ID NO: 15464 - RNA, 19 nt, Artificial Sequence
  Synthetic
gaccaaacgucaucaaauu

SEQ ID NO: 15465 - RNA, 19 nt, Artificial Sequence
  Synthetic
gagcagaaggaaugggcuu

SEQ ID NO: 15466 - RNA, 19 nt, Artificial Sequence
  Synthetic
ggaaugaacacguuugcua

SEQ ID NO: 15467 - RNA, 19 nt, Artificial Sequence
  Synthetic
gugcgaaaguggauuuaau

SEQ ID NO: 15468 - RNA, 19 nt, Artificial Sequence
  Synthetic
ggaaugacugagaaaguau

SEQ ID NO: 15469 - RNA, 19 nt, Artificial Sequence
  Synthetic
gcugcuggcuggugaaaga

SEQ ID NO: 15470 - RNA, 19 nt, Artificial Sequence
  Synthetic
cgccauaccugguguccaa

SEQ ID NO: 15471 - RNA, 19 nt, Artificial Sequence
  Synthetic
ggucugaaccaguggaugu

SEQ ID NO: 15472 - RNA, 19 nt, Artificial Sequence
  Synthetic
aaacugagauccugacauu

SEQ ID NO: 15473 - RNA, 19 nt, Artificial Sequence
  Synthetic
gggacaugauccaacagaa

SEQ ID NO: 15474 - RNA, 19 nt, Artificial Sequence
  Synthetic
gcccagaauauuuguacaa

SEQ ID NO: 15475 - RNA, 19 nt, Artificial Sequence
  Synthetic
cagagauccugguugcuaa

SEQ ID NO: 15476 - RNA, 19 nt, Artificial Sequence
  Synthetic
ggagaagauuccagugucu

SEQ ID NO: 15477 - RNA, 19 nt, Artificial Sequence
  Synthetic
gguaguagcuaaugaaauu

SEQ ID NO: 15478 - RNA, 19 nt, Artificial Sequence
  Synthetic
uggaagacaucgagaagua

SEQ ID NO: 15479 - RNA, 19 nt, Artificial Sequence
  Synthetic
ggaagagcccggaaagaaa

SEQ ID NO: 15480 - RNA, 19 nt, Artificial Sequence
  Synthetic
agaggaggauuuugagaaa

SEQ ID NO: 15481 - RNA, 19 nt, Artificial Sequence
  Synthetic
ccugugaaaucgagagaga

SEQ ID NO: 15482 - RNA, 19 nt, Artificial Sequence
  Synthetic
ggaugaaguuugacgcaca

SEQ ID NO: 15483 - RNA, 19 nt, Artificial Sequence
  Synthetic
gaaagaaaccuguggaucu

SEQ ID NO: 15484 - RNA, 19 nt, Artificial Sequence
  Synthetic
cugcagaacauaaaggcaa

SEQ ID NO: 15485 - RNA, 19 nt, Artificial Sequence
  Synthetic
ggaaggacaaggaaggcaa

SEQ ID NO: 15486 - RNA, 19 nt, Artificial Sequence
  Synthetic
agaauaagccagauguaau

SEQ ID NO: 15487 - RNA, 19 nt, Artificial Sequence
  Synthetic
gccuugaagcaaagaauaa

SEQ ID NO: 15488 - RNA, 19 nt, Artificial Sequence
  Synthetic
gggaagagcccggaaagaa

SEQ ID NO: 15489 - RNA, 19 nt, Artificial Sequence
  Synthetic
ugugaaaucgagagagaga

SEQ ID NO: 15490 - RNA, 19 nt, Artificial Sequence
  Synthetic
agauggaggaagagggcau

SEQ ID NO: 15491 - RNA, 19 nt, Artificial Sequence
  Synthetic
ggaugucagaggaggauuu

SEQ ID NO: 15492 - RNA, 19 nt, Artificial Sequence
  Synthetic
uggccaggaucgaaagcaa

SEQ ID NO: 15493 - RNA, 19 nt, Artificial Sequence
  Synthetic
gagaauaagccagauguaa

SEQ ID NO: 15494 - RNA, 19 nt, Artificial Sequence
  Synthetic
gaucauccaaagagaagaa

SEQ ID NO: 15495 - RNA, 19 nt, Artificial Sequence
  Synthetic
gcuacaacuucggcaaaua

SEQ ID NO: 15496 - RNA, 19 nt, Artificial Sequence
  Synthetic
aagcaaagaauaagccaga

SEQ ID NO: 15497 - RNA, 19 nt, Artificial Sequence
  Synthetic
ugcagaacauaaaggcaaa

SEQ ID NO: 15498 - RNA, 19 nt, Artificial Sequence
  Synthetic
gggcaaguguucccaaauu

SEQ ID NO: 15499 - RNA, 19 nt, Artificial Sequence
  Synthetic
gguggaagguugagugcgu

SEQ ID NO: 15500 - RNA, 19 nt, Artificial Sequence
  Synthetic
ccaaaguuguccagggaag

SEQ ID NO: 15501 - RNA, 19 nt, Artificial Sequence
  Synthetic
ccugagugcuuuaccuuua

SEQ ID NO: 15502 - RNA, 19 nt, Artificial Sequence
  Synthetic
ggauaagaaccacagaaca

SEQ ID NO: 15503 - RNA, 19 nt, Artificial Sequence
  Synthetic
gauaagaaccacagaacac

SEQ ID NO: 15504 - RNA, 19 nt, Artificial Sequence
  Synthetic
aucgaaagcaagacgguua

SEQ ID NO: 15505 - RNA, 19 nt, Artificial Sequence
  Synthetic
acccaagagcaaagagaca

SEQ ID NO: 15506 - RNA, 19 nt, Artificial Sequence
  Synthetic
ggaacucgcugcucgggaa

SEQ ID NO: 15507 - RNA, 19 nt, Artificial Sequence
  Synthetic
ggacagugcccgagagaca

SEQ ID NO: 15508 - RNA, 19 nt, Artificial Sequence
  Synthetic
ccacaaagacuguccaaua

SEQ ID NO: 15509 - RNA, 19 nt, Artificial Sequence
  Synthetic
cagcagaacacaaagggaa

SEQ ID NO: 15510 - RNA, 19 nt, Artificial Sequence
  Synthetic
uggcacgaguagagagcaa

SEQ ID NO: 15511 - RNA, 19 nt, Artificial Sequence
  Synthetic
ggaugagguuugacaguga

SEQ ID NO: 15512 - RNA, 19 nt, Artificial Sequence
  Synthetic
ggagaaugcucgggugcua

SEQ ID NO: 15513 - RNA, 19 nt, Artificial Sequence
  Synthetic
gcagaaaauaugagcaauu

SEQ ID NO: 15514 - RNA, 19 nt, Artificial Sequence
  Synthetic
gaacugaggcugagaauac

SEQ ID NO: 15515 - RNA, 19 nt, Artificial Sequence
  Synthetic
uggcuacaauccagaguaa

SEQ ID NO: 15516 - RNA, 19 nt, Artificial Sequence
  Synthetic
ccauagaccuucccacaaa

SEQ ID NO: 15517 - RNA, 19 nt, Artificial Sequence
  Synthetic
gcuacaauccagaguaaca

SEQ ID NO: 15518 - RNA, 19 nt, Artificial Sequence
  Synthetic
guagagagcaagacgguga

SEQ ID NO: 15519 - RNA, 19 nt, Artificial Sequence
  Synthetic
cacaaagacuguccaauaa

SEQ ID NO: 15520 - RNA, 19 nt, Artificial Sequence
  Synthetic
gcuggaaaguggagugugu

SEQ ID NO: 15521 - RNA, 19 nt, Artificial Sequence
  Synthetic
ccugggagauggugacuuu

SEQ ID NO: 15522 - RNA, 19 nt, Artificial Sequence
  Synthetic
gaacacaaagggaagauca

SEQ ID NO: 15523 - RNA, 19 nt, Artificial Sequence
  Synthetic
ggagagacgugugcacaaa

SEQ ID NO: 15524 - RNA, 19 nt, Artificial Sequence
  Synthetic
guggcaagcaugcguauua

SEQ ID NO: 15525 - RNA, 19 nt, Artificial Sequence
  Synthetic
gcaacucccugcugggcaa

SEQ ID NO: 15526 - RNA, 19 nt, Artificial Sequence
  Synthetic
acaggagguucgugacauu

SEQ ID NO: 15527 - RNA, 19 nt, Artificial Sequence
  Synthetic
gagcuguggaugagagguu

SEQ ID NO: 15528 - RNA, 19 nt, Artificial Sequence
  Synthetic
gcgagugcuuaguggagau

SEQ ID NO: 15529 - RNA, 19 nt, Artificial Sequence
  Synthetic
gaugauauugcuuggauga

SEQ ID NO: 15530 - RNA, 19 nt, Artificial Sequence
  Synthetic
gcuacaacuucgggcacua

SEQ ID NO: 15531 - RNA, 19 nt, Artificial Sequence
  Synthetic
gcguguacugggagggcau

SEQ ID NO: 15532 - RNA, 19 nt, Artificial Sequence
  Synthetic
caaagacuguccaauaaua

SEQ ID NO: 15533 - RNA, 19 nt, Artificial Sequence
  Synthetic
cuggaaaccuggugacaag

SEQ ID NO: 15534 - RNA, 19 nt, Artificial Sequence
  Synthetic
ggaagaucaucaugcacga

SEQ ID NO: 15535 - RNA, 19 nt, Artificial Sequence
  Synthetic
uggagagacgugugcacaa

SEQ ID NO: 15536 - RNA, 19 nt, Artificial Sequence
  Synthetic
caagaagugcuuugcccua

SEQ ID NO: 15537 - RNA, 19 nt, Artificial Sequence
  Synthetic
ugagauuggcuuugggaaa

SEQ ID NO: 15538 - RNA, 19 nt, Artificial Sequence
  Synthetic
cagacaagauggugacaau

SEQ ID NO: 15539 - RNA, 19 nt, Artificial Sequence
  Synthetic
acgaggaguucaagacaua

SEQ ID NO: 15540 - RNA, 19 nt, Artificial Sequence
  Synthetic
gggaacgaguggugauuga

SEQ ID NO: 15541 - RNA, 19 nt, Artificial Sequence
  Synthetic
gcgaacaggaggagaagga

SEQ ID NO: 15542 - RNA, 19 nt, Artificial Sequence
  Synthetic
caacaaagacauacuccaa

SEQ ID NO: 15543 - RNA, 19 nt, Artificial Sequence
  Synthetic
ccaaugagguggugacacu

SEQ ID NO: 15544 - RNA, 19 nt, Artificial Sequence
  Synthetic
ccacaaacuuccugacacu

SEQ ID NO: 15545 - RNA, 19 nt, Artificial Sequence
  Synthetic
caaccauggcugaagacua

SEQ ID NO: 15546 - RNA, 19 nt, Artificial Sequence
  Synthetic
acaaggaccugaagcagua

SEQ ID NO: 15547 - RNA, 19 nt, Artificial Sequence
  Synthetic
caacaugcacaacgugaaa

SEQ ID NO: 15548 - RNA, 19 nt, Artificial Sequence
  Synthetic
uugggaaacuggagaccua

SEQ ID NO: 15549 - RNA, 19 nt, Artificial Sequence
  Synthetic
ggacuagaacugagugcuu

SEQ ID NO: 15550 - RNA, 19 nt, Artificial Sequence
  Synthetic
ccacugaggacaucaacaa

SEQ ID NO: 15551 - RNA, 19 nt, Artificial Sequence
  Synthetic
acauuaagcuggacaaacu

SEQ ID NO: 15552 - RNA, 19 nt, Artificial Sequence
  Synthetic
caacaagcgccuaucacua

SEQ ID NO: 15553 - RNA, 19 nt, Artificial Sequence
  Synthetic
ucaccaagcuguugcaguu

SEQ ID NO: 15554 - RNA, 19 nt, Artificial Sequence
  Synthetic
cagaggaugccaugaaaca

SEQ ID NO: 15555 - RNA, 19 nt, Artificial Sequence
  Synthetic
ccgcagaggaugccaugaa

SEQ ID NO: 15556 - RNA, 19 nt, Artificial Sequence
  Synthetic
agaucagacuggaacauga

SEQ ID NO: 15557 - RNA, 19 nt, Artificial Sequence
  Synthetic
uaaaggagauucagcuaca

SEQ ID NO: 15558 - RNA, 19 nt, Artificial Sequence
  Synthetic
caccagagauugugcacga

SEQ ID NO: 15559 - RNA, 19 nt, Artificial Sequence
  Synthetic
ccauggaucggaugaagaa

SEQ ID NO: 15560 - RNA, 19 nt, Artificial Sequence
  Synthetic
aaagcaagcucacagacaa

SEQ ID NO: 15561 - RNA, 19 nt, Artificial Sequence
  Synthetic
ggacaaacugggcgagggu

SEQ ID NO: 15562 - RNA, 19 nt, Artificial Sequence
  Synthetic
agauugugcacgaggacuu

SEQ ID NO: 15563 - RNA, 19 nt, Artificial Sequence
  Synthetic
gacaaugccuugagucuga

SEQ ID NO: 15564 - RNA, 19 nt, Artificial Sequence
  Synthetic
acuaaaggagauucagcua

SEQ ID NO: 15565 - RNA, 19 nt, Artificial Sequence
  Synthetic
uguccaacgaggaguucaa

SEQ ID NO: 15566 - RNA, 19 nt, Artificial Sequence
  Synthetic
guuccugaaugcaccauaa

SEQ ID NO: 15567 - RNA, 19 nt, Artificial Sequence
  Synthetic
cagaauaccugauggauau

SEQ ID NO: 15568 - RNA, 19 nt, Artificial Sequence
  Synthetic
gcauauugccauagaagaa

SEQ ID NO: 15569 - RNA, 19 nt, Artificial Sequence
  Synthetic
ggaauugaguugauaacaa

SEQ ID NO: 15570 - RNA, 19 nt, Artificial Sequence
  Synthetic
gggaagaacagaagacaga

SEQ ID NO: 15571 - RNA, 19 nt, Artificial Sequence
  Synthetic
ggaauugaguugauaagaa

SEQ ID NO: 15572 - RNA, 19 nt, Artificial Sequence
  Synthetic
ccacaaagaccuacucaaa

SEQ ID NO: 15573 - RNA, 19 nt, Artificial Sequence
  Synthetic
guggaaacaucaugaguau

SEQ ID NO: 15574 - RNA, 19 nt, Artificial Sequence
  Synthetic
agaaguaaauugacagaga

SEQ ID NO: 15575 - RNA, 19 nt, Artificial Sequence
  Synthetic
gaucagauggugagaguga

SEQ ID NO: 15576 - RNA, 19 nt, Artificial Sequence
  Synthetic
ggacaugggaagaacagaa

SEQ ID NO: 15577 - RNA, 19 nt, Artificial Sequence
  Synthetic
agaaauuggcuuuggaaaa

SEQ ID NO: 15578 - RNA, 19 nt, Artificial Sequence
  Synthetic
cugaagaggccaugaaaca

SEQ ID NO: 15579 - RNA, 19 nt, Artificial Sequence
  Synthetic
gguuagacucugaaggaau

SEQ ID NO: 15580 - RNA, 19 nt, Artificial Sequence
  Synthetic
gaaaggagaauuaaagcua

SEQ ID NO: 15581 - RNA, 19 nt, Artificial Sequence
  Synthetic
cagaaauggaagcagauua

SEQ ID NO: 15582 - RNA, 19 nt, Artificial Sequence
  Synthetic
ugaccaagcuucugggaca

SEQ ID NO: 15583 - RNA, 19 nt, Artificial Sequence
  Synthetic
cagagaauuugguggcauu

SEQ ID NO: 15584 - RNA, 19 nt, Artificial Sequence
  Synthetic
gcuagcagauuuuggacua

SEQ ID NO: 15585 - RNA, 19 nt, Artificial Sequence
  Synthetic
cugcacagcuauaagagaa

SEQ ID NO: 15586 - RNA, 19 nt, Artificial Sequence
  Synthetic
cagauaaauccuugacuuu

SEQ ID NO: 15587 - RNA, 19 nt, Artificial Sequence
  Synthetic
gaaaacagcagcaaggaua

SEQ ID NO: 15588 - RNA, 19 nt, Artificial Sequence
  Synthetic
gcaacaguauauaaaggaa

SEQ ID NO: 15589 - RNA, 19 nt, Artificial Sequence
  Synthetic
ggaucucaauggaggauuu

SEQ ID NO: 15590 - RNA, 19 nt, Artificial Sequence
  Synthetic
cagaaauuggcuuuggaaa

SEQ ID NO: 15591 - RNA, 19 nt, Artificial Sequence
  Synthetic
cauuaaugagaaaggagaa

SEQ ID NO: 15592 - RNA, 19 nt, Artificial Sequence
  Synthetic
aggaagaaguaaauugaca

SEQ ID NO: 15593 - RNA, 19 nt, Artificial Sequence
  Synthetic
cuucaaaugaggaguucaa

SEQ ID NO: 15594 - RNA, 19 nt, Artificial Sequence
  Synthetic
gggaucagauggugagagu

SEQ ID NO: 15595 - RNA, 19 nt, Artificial Sequence
  Synthetic
guacauaugcaacaguaua

SEQ ID NO: 15596 - RNA, 19 nt, Artificial Sequence
  Synthetic
cagaaaucguauacauaga

SEQ ID NO: 15597 - RNA, 19 nt, Artificial Sequence
  Synthetic
agacauuggcuuugggaaa

SEQ ID NO: 15598 - RNA, 19 nt, Artificial Sequence
  Synthetic
gggaagaacaggcggcaga

SEQ ID NO: 15599 - RNA, 19 nt, Artificial Sequence
  Synthetic
gcagcaaacugacggagaa

SEQ ID NO: 15600 - RNA, 19 nt, Artificial Sequence
  Synthetic
ccacaaagacuuacuccaa

SEQ ID NO: 15601 - RNA, 19 nt, Artificial Sequence
  Synthetic
cuucaaagggcgcagcaaa

SEQ ID NO: 15602 - RNA, 19 nt, Artificial Sequence
  Synthetic
ccauggaggacgucagcaa

SEQ ID NO: 15603 - RNA, 19 nt, Artificial Sequence
  Synthetic
uugggaaacuggaaacaua

SEQ ID NO: 15604 - RNA, 19 nt, Artificial Sequence
  Synthetic
gugggaaccucaugagcau

SEQ ID NO: 15605 - RNA, 19 nt, Artificial Sequence
  Synthetic
gcacugagaccauugaaga

SEQ ID NO: 15606 - RNA, 19 nt, Artificial Sequence
  Synthetic
acgugaaacuggacaaacu

SEQ ID NO: 15607 - RNA, 19 nt, Artificial Sequence
  Synthetic
ccaaugagguggugacccu

SEQ ID NO: 15608 - RNA, 19 nt, Artificial Sequence
  Synthetic
acagugaccugaagcagua

SEQ ID NO: 15609 - RNA, 19 nt, Artificial Sequence
  Synthetic
uugaagaauccuuggcuga

SEQ ID NO: 15610 - RNA, 19 nt, Artificial Sequence
  Synthetic
uugaguaccuggacaguga

SEQ ID NO: 15611 - RNA, 19 nt, Artificial Sequence
  Synthetic
acuggaaacauacgugaaa

SEQ ID NO: 15612 - RNA, 19 nt, Artificial Sequence
  Synthetic
cggagaaccuuguggcccu

SEQ ID NO: 15613 - RNA, 19 nt, Artificial Sequence
  Synthetic
agaacaggcggcagagcau

SEQ ID NO: 15614 - RNA, 19 nt, Artificial Sequence
  Synthetic
gcucgguccucuuggcaga

SEQ ID NO: 15615 - RNA, 19 nt, Artificial Sequence
  Synthetic
ccgaugugcugcugggauc

SEQ ID NO: 15616 - RNA, 19 nt, Artificial Sequence
  Synthetic
cauacgugaaacuggacaa

SEQ ID NO: 15617 - RNA, 19 nt, Artificial Sequence
  Synthetic
gcaaacugacggagaaccu

SEQ ID NO: 15618 - RNA, 19 nt, Artificial Sequence
  Synthetic
aaacauacgugaaacugga

SEQ ID NO: 15619 - RNA, 19 nt, Artificial Sequence
  Synthetic
uggaaacauacgugaaacu

SEQ ID NO: 15620 - RNA, 19 nt, Artificial Sequence
  Synthetic
cacugagaccauugaagaa

SEQ ID NO: 15621 - RNA, 19 nt, Artificial Sequence
  Synthetic
agauccagcuccagaagga

SEQ ID NO: 15622 - RNA, 19 nt, Artificial Sequence
  Synthetic
ccaagucagugcccacaaa

SEQ ID NO: 15623 - RNA, 19 nt, Artificial Sequence
  Synthetic
gcaccagcuugaagacacu

SEQ ID NO: 15624 - RNA, 19 nt, Artificial Sequence
  Synthetic
gaagaauccuuggcugaau

SEQ ID NO: 15625 - RNA, 19 nt, Artificial Sequence
  Synthetic
aggugucucugcugaagaa

SEQ ID NO: 15626 - RNA, 19 nt, Artificial Sequence
  Synthetic
gguaauagcuuuagugaau

SEQ ID NO: 15627 - RNA, 19 nt, Artificial Sequence
  Synthetic
gcagggaguuugagagaaa

SEQ ID NO: 15628 - RNA, 19 nt, Artificial Sequence
  Synthetic
uugcauaagaauagggaua

SEQ ID NO: 15629 - RNA, 19 nt, Artificial Sequence
  Synthetic
ucacaaugcuggaagaaau

SEQ ID NO: 15630 - RNA, 19 nt, Artificial Sequence
  Synthetic
gcauagagaacaaaguaaa

SEQ ID NO: 15631 - RNA, 19 nt, Artificial Sequence
  Synthetic
ggaagaugcagaagcaaua

SEQ ID NO: 15632 - RNA, 19 nt, Artificial Sequence
  Synthetic
cuaaguaggugaugaguuu

SEQ ID NO: 15633 - RNA, 19 nt, Artificial Sequence
  Synthetic
cagagaagccaaagaaaga

SEQ ID NO: 15634 - RNA, 19 nt, Artificial Sequence
  Synthetic
aggaacagccuauggauua

SEQ ID NO: 15635 - RNA, 19 nt, Artificial Sequence
  Synthetic
caaagaaagagcuggauau

SEQ ID NO: 15636 - RNA, 19 nt, Artificial Sequence
  Synthetic
ggugaaagacaguggagau

SEQ ID NO: 15637 - RNA, 19 nt, Artificial Sequence
  Synthetic
uggaaaagauucaggaaau

SEQ ID NO: 15638 - RNA, 19 nt, Artificial Sequence
  Synthetic
ggucaaagaaaugaagaaa

SEQ ID NO: 15639 - RNA, 19 nt, Artificial Sequence
  Synthetic
gaaagaaguuccagaccau

SEQ ID NO: 15640 - RNA, 19 nt, Artificial Sequence
  Synthetic
ggaaaucagaaaugaagaa

SEQ ID NO: 15641 - RNA, 19 nt, Artificial Sequence
  Synthetic
ccaaagaaagagcuggaua

SEQ ID NO: 15642 - RNA, 19 nt, Artificial Sequence
  Synthetic
gaaauaagguaucgaagca

SEQ ID NO: 15643 - RNA, 19 nt, Artificial Sequence
  Synthetic
ggaaaagauucaggaaaua

SEQ ID NO: 15644 - RNA, 19 nt, Artificial Sequence
  Synthetic
cuggagaagugaaaggcaa

SEQ ID NO: 15645 - RNA, 19 nt, Artificial Sequence
  Synthetic
ggaagaagacaguggccau

SEQ ID NO: 15646 - RNA, 19 nt, Artificial Sequence
  Synthetic
gaaauucgcuggaggguca

SEQ ID NO: 15647 - RNA, 19 nt, Artificial Sequence
  Synthetic
gaagagggacauaagauaa

SEQ ID NO: 15648 - RNA, 19 nt, Artificial Sequence
  Synthetic
ugagugagauuguggagaa

SEQ ID NO: 15649 - RNA, 19 nt, Artificial Sequence
  Synthetic
gugaugaguuugacaguuu

SEQ ID NO: 15650 - RNA, 19 nt, Artificial Sequence
  Synthetic
ggacuugguugauguuuaa

SEQ ID NO: 15651 - RNA, 19 nt, Artificial Sequence
  Synthetic
caucagagcuggaucuaga

SEQ ID NO: 15652 - RNA, 19 nt, Artificial Sequence
  Synthetic
ccagggaggucaaagaaau

SEQ ID NO: 15653 - RNA, 19 nt, Artificial Sequence
  Synthetic
aaugaaacuuccuggacua

SEQ ID NO: 15654 - RNA, 19 nt, Artificial Sequence
  Synthetic
cagaagagaaugagcuuga

SEQ ID NO: 15655 - RNA, 19 nt, Artificial Sequence
  Synthetic
cgacagaacuucagcauug

SEQ ID NO: 15656 - RNA, 19 nt, Artificial Sequence
  Synthetic
gcgcggagcucuacagcaa

SEQ ID NO: 15657 - RNA, 19 nt, Artificial Sequence
  Synthetic
gcacauuuguccagaugaa

SEQ ID NO: 15658 - RNA, 19 nt, Artificial Sequence
  Synthetic
acggagaccugguggacua

SEQ ID NO: 15659 - RNA, 19 nt, Artificial Sequence
  Synthetic
ggaaugagguggucaacuu

SEQ ID NO: 15660 - RNA, 19 nt, Artificial Sequence
  Synthetic
ugaaaggagacgucaaaua

SEQ ID NO: 15661 - RNA, 19 nt, Artificial Sequence
  Synthetic
ggaagagaaguuugagauu

SEQ ID NO: 15662 - RNA, 19 nt, Artificial Sequence
  Synthetic
agguaguguucgaggccua

SEQ ID NO: 15663 - RNA, 19 nt, Artificial Sequence
  Synthetic
ggacaaagagggcaaauga

SEQ ID NO: 15664 - RNA, 19 nt, Artificial Sequence
  Synthetic
gagaggaccugccgagcaa

SEQ ID NO: 15665 - RNA, 19 nt, Artificial Sequence
  Synthetic
gcacuaacauucuagagua

SEQ ID NO: 15666 - RNA, 19 nt, Artificial Sequence
  Synthetic
agagccagcuggagacuaa

SEQ ID NO: 15667 - RNA, 19 nt, Artificial Sequence
  Synthetic
cgaugaaaguggccgucaa

SEQ ID NO: 15668 - RNA, 19 nt, Artificial Sequence
  Synthetic
cugcacaggccuugacuua

SEQ ID NO: 15669 - RNA, 19 nt, Artificial Sequence
  Synthetic
ugacacugcacgagaagaa

SEQ ID NO: 15670 - RNA, 19 nt, Artificial Sequence
  Synthetic
ccaaagauauaaucaccua

SEQ ID NO: 15671 - RNA, 19 nt, Artificial Sequence
  Synthetic
gggaagagaaguuugagau

SEQ ID NO: 15672 - RNA, 19 nt, Artificial Sequence
  Synthetic
caacgagucuccagugcua

SEQ ID NO: 15673 - RNA, 19 nt, Artificial Sequence
  Synthetic
caugaaaggagacgucaaa

SEQ ID NO: 15674 - RNA, 19 nt, Artificial Sequence
  Synthetic
ggccagagcuuguccucaa

SEQ ID NO: 15675 - RNA, 19 nt, Artificial Sequence
  Synthetic
gggaggaggagcaggaguu

SEQ ID NO: 15676 - RNA, 19 nt, Artificial Sequence
  Synthetic
cgucaaauaugcagacauc

SEQ ID NO: 15677 - RNA, 19 nt, Artificial Sequence
  Synthetic
acauggaccucgugggcuu

SEQ ID NO: 15678 - RNA, 19 nt, Artificial Sequence
  Synthetic
gcaaugugacggagagugu

SEQ ID NO: 15679 - RNA, 19 nt, Artificial Sequence
  Synthetic
gggcggaagcagaggauag

SEQ ID NO: 15680 - RNA, 19 nt, Artificial Sequence
  Synthetic
gggcuagacacgggagaau

SEQ ID NO: 15681 - RNA, 19 nt, Artificial Sequence
  Synthetic
ucacauuuauacagcagaa

SEQ ID NO: 15682 - RNA, 19 nt, Artificial Sequence
  Synthetic
gcacaggccuugacuuaga

SEQ ID NO: 15683 - RNA, 19 nt, Artificial Sequence
  Synthetic
acaaagagggcaaaugaga

SEQ ID NO: 15684 - RNA, 19 nt, Artificial Sequence
  Synthetic
cugacuuccucuuggauau

SEQ ID NO: 15685 - RNA, 19 nt, Artificial Sequence
  Synthetic
gaggagagccagcuggaga

SEQ ID NO: 15686 - RNA, 19 nt, Artificial Sequence
  Synthetic
gcaggaaggacgaggccaa

SEQ ID NO: 15687 - RNA, 19 nt, Artificial Sequence
  Synthetic
acaagaaggugaagcccaa

SEQ ID NO: 15688 - RNA, 19 nt, Artificial Sequence
  Synthetic
gagaauagaaucaaaccua

SEQ ID NO: 15689 - RNA, 19 nt, Artificial Sequence
  Synthetic
ugaugcaagugcuggauaa

SEQ ID NO: 15690 - RNA, 19 nt, Artificial Sequence
  Synthetic
cgauguaaagggaguagaa

SEQ ID NO: 15691 - RNA, 19 nt, Artificial Sequence
  Synthetic
ggacagggacucagccaau

SEQ ID NO: 15692 - RNA, 19 nt, Artificial Sequence
  Synthetic
gaacaagcguccaaaagaa

SEQ ID NO: 15693 - RNA, 19 nt, Artificial Sequence
  Synthetic
ggacacaccacgagaaucu

SEQ ID NO: 15694 - RNA, 19 nt, Artificial Sequence
  Synthetic
aggagagaauagaaucaaa

SEQ ID NO: 15695 - RNA, 19 nt, Artificial Sequence
  Synthetic
auguaaagggaguagaauu

SEQ ID NO: 15696 - RNA, 19 nt, Artificial Sequence
  Synthetic
ggaggauguuacuggccaa

SEQ ID NO: 15697 - RNA, 19 nt, Artificial Sequence
  Synthetic
guaaugaacuuauggaaag

SEQ ID NO: 15698 - RNA, 19 nt, Artificial Sequence
  Synthetic
ggggcaaacuguagagcuu

SEQ ID NO: 15699 - RNA, 19 nt, Artificial Sequence
  Synthetic
aaaagaaccaggagagaau

SEQ ID NO: 15700 - RNA, 19 nt, Artificial Sequence
  Synthetic
gaaucaaaccuaccaacaa

SEQ ID NO: 15701 - RNA, 19 nt, Artificial Sequence
  Synthetic
gacgauugaugcaggauau

SEQ ID NO: 15702 - RNA, 19 nt, Artificial Sequence
  Synthetic
ggacauuguuuaugacaug

SEQ ID NO: 15703 - RNA, 19 nt, Artificial Sequence
  Synthetic
uguagagcuucgauguaaa

SEQ ID NO: 15704 - RNA, 19 nt, Artificial Sequence
  Synthetic
acgaagcgcuggaggaugu

SEQ ID NO: 15705 - RNA, 19 nt, Artificial Sequence
  Synthetic
ccaggagagaauagaauca

SEQ ID NO: 15706 - RNA, 19 nt, Artificial Sequence
  Synthetic
gcuucgauguaaagggagu

SEQ ID NO: 15707 - RNA, 19 nt, Artificial Sequence
  Synthetic
cuaccaacaagaaggugaa

SEQ ID NO: 15708 - RNA, 19 nt, Artificial Sequence
  Synthetic
cuguagagcuucgauguaa

SEQ ID NO: 15709 - RNA, 19 nt, Artificial Sequence
  Synthetic
ggacagaccacaguagcua

SEQ ID NO: 15710 - RNA, 19 nt, Artificial Sequence
  Synthetic
agacgauugaugcaggaua

SEQ ID NO: 15711 - RNA, 19 nt, Artificial Sequence
  Synthetic
augaaaggccugugacgau

SEQ ID NO: 15712 - RNA, 19 nt, Artificial Sequence
  Synthetic
ccaaggagaucccagccaa

SEQ ID NO: 15713 - RNA, 19 nt, Artificial Sequence
  Synthetic
ucaagcagaaugagcgcua

SEQ ID NO: 15714 - RNA, 19 nt, Artificial Sequence
  Synthetic
acagaaagcaugauuuuga

SEQ ID NO: 15715 - RNA, 19 nt, Artificial Sequence
  Synthetic
acccagacauccaaacuaa

SEQ ID NO: 15716 - RNA, 19 nt, Artificial Sequence
  Synthetic
ggacaaaagugcugaggau

SEQ ID NO: 15717 - RNA, 19 nt, Artificial Sequence
  Synthetic
cgaacuagaacuugaagaa

SEQ ID NO: 15718 - RNA, 19 nt, Artificial Sequence
  Synthetic
ucaacagacucaauagaaa

SEQ ID NO: 15719 - RNA, 19 nt, Artificial Sequence
  Synthetic
acuagaacuugaagaacua

SEQ ID NO: 15720 - RNA, 19 nt, Artificial Sequence
  Synthetic
gaucagaaaccgacacaau

SEQ ID NO: 15721 - RNA, 19 nt, Artificial Sequence
  Synthetic
gcauaaauccaaacugcaa

SEQ ID NO: 15722 - RNA, 19 nt, Artificial Sequence
  Synthetic
agaaagacucccaguguau

SEQ ID NO: 15723 - RNA, 19 nt, Artificial Sequence
  Synthetic
ccacaauggcccagggugu

SEQ ID NO: 15724 - RNA, 19 nt, Artificial Sequence
  Synthetic
cuggcuaauugaaguguaa

SEQ ID NO: 15725 - RNA, 19 nt, Artificial Sequence
  Synthetic
gcagagaacccaaagacau

SEQ ID NO: 15726 - RNA, 19 nt, Artificial Sequence
  Synthetic
agccaauacaagugguuua

SEQ ID NO: 15727 - RNA, 19 nt, Artificial Sequence
  Synthetic
ccuagaggguuacgggaca

SEQ ID NO: 15728 - RNA, 19 nt, Artificial Sequence
  Synthetic
uugaauacaaggagagcuu

SEQ ID NO: 15729 - RNA, 19 nt, Artificial Sequence
  Synthetic
cacaauacuuccaaggaga

SEQ ID NO: 15730 - RNA, 19 nt, Artificial Sequence
  Synthetic
ccaaagacaugacgacguu

SEQ ID NO: 15731 - RNA, 19 nt, Artificial Sequence
  Synthetic
gugauugaauacaaggaga

SEQ ID NO: 15732 - RNA, 19 nt, Artificial Sequence
  Synthetic
uggaaaaggcaaaggaagu

SEQ ID NO: 15733 - RNA, 19 nt, Artificial Sequence
  Synthetic
ggacuucggaucagugaau

SEQ ID NO: 15734 - RNA, 19 nt, Artificial Sequence
  Synthetic
aaggagaccugaagcugua

SEQ ID NO: 15735 - RNA, 19 nt, Artificial Sequence
  Synthetic
cuuuauuguuugguggaaa

SEQ ID NO: 15736 - RNA, 19 nt, Artificial Sequence
  Synthetic
acaccaaccacgaggcuga

SEQ ID NO: 15737 - RNA, 19 nt, Artificial Sequence
  Synthetic
aaacacauuggaagcauaa

SEQ ID NO: 15738 - RNA, 19 nt, Artificial Sequence
  Synthetic
ugucagacuggcaaauaua

SEQ ID NO: 15739 - RNA, 19 nt, Artificial Sequence
  Synthetic
aagaaugcaaugagagcca

SEQ ID NO: 15740 - RNA, 19 nt, Artificial Sequence
  Synthetic
ucagugaaugcuugugaaa

SEQ ID NO: 15741 - RNA, 19 nt, Artificial Sequence
  Synthetic
gcugaggaugcuaaagcua

SEQ ID NO: 15742 - RNA, 19 nt, Artificial Sequence
  Synthetic
ugaggaugcuaaagcuauu

SEQ ID NO: 15743 - RNA, 19 nt, Artificial Sequence
  Synthetic
ucacaugguguuugaacuu

SEQ ID NO: 15744 - RNA, 19 nt, Artificial Sequence
  Synthetic
uagaaagacucccagugua

SEQ ID NO: 15745 - RNA, 19 nt, Artificial Sequence
  Synthetic
aggauuugacugugaagau

SEQ ID NO: 15746 - RNA, 19 nt, Artificial Sequence
  Synthetic
agauaaugcaugugagaaa

SEQ ID NO: 15747 - RNA, 19 nt, Artificial Sequence
  Synthetic
gugaaauaaaccagacaua

SEQ ID NO: 15748 - RNA, 19 nt, Artificial Sequence
  Synthetic
ggugaaagaugcauaugaa

SEQ ID NO: 15749 - RNA, 19 nt, Artificial Sequence
  Synthetic
agucagaaauagacacaau

SEQ ID NO: 15750 - RNA, 19 nt, Artificial Sequence
  Synthetic
ccaagcagaucgagcgcua

SEQ ID NO: 15751 - RNA, 19 nt, Artificial Sequence
  Synthetic
gaaagaugcauaugaaaca

SEQ ID NO: 15752 - RNA, 19 nt, Artificial Sequence
  Synthetic
gcacaaggagugauugaau

SEQ ID NO: 15753 - RNA, 19 nt, Artificial Sequence
  Synthetic
ugccaaagcgccagacaaa

SEQ ID NO: 15754 - RNA, 19 nt, Artificial Sequence
  Synthetic
cauuaagaucagugaccua

SEQ ID NO: 15755 - RNA, 19 nt, Artificial Sequence
  Synthetic
acacaaugagagaaguuaa

SEQ ID NO: 15756 - RNA, 19 nt, Artificial Sequence
  Synthetic
cauaaacguuguagguuga

SEQ ID NO: 15757 - RNA, 19 nt, Artificial Sequence
  Synthetic
cguuguagguugaaacuga

SEQ ID NO: 15758 - RNA, 19 nt, Artificial Sequence
  Synthetic
gguuaugguuugccaauuu

SEQ ID NO: 15759 - RNA, 19 nt, Artificial Sequence
  Synthetic
uggcggauguggugaaaga

SEQ ID NO: 15760 - RNA, 19 nt, Artificial Sequence
  Synthetic
cacaaggagugauugaaua

SEQ ID NO: 15761 - RNA, 19 nt, Artificial Sequence
  Synthetic
gcacuaacauccaauauuu

SEQ ID NO: 15762 - RNA, 19 nt, Artificial Sequence
  Synthetic
ugauugaauacaaggagaa

SEQ ID NO: 15763 - RNA, 19 nt, Artificial Sequence
  Synthetic
gugaaagaugcauaugaaa

SEQ ID NO: 15764 - RNA, 19 nt, Artificial Sequence
  Synthetic
gggugaaucuugaagucau

SEQ ID NO: 15765 - RNA, 19 nt, Artificial Sequence
  Synthetic
aaauaagagcccugaggau

SEQ ID NO: 15766 - RNA, 19 nt, Artificial Sequence
  Synthetic
ggacuucgggagagauaau

SEQ ID NO: 15767 - RNA, 19 nt, Artificial Sequence
  Synthetic
guacugaugcugucauuua

SEQ ID NO: 15768 - RNA, 19 nt, Artificial Sequence
  Synthetic
ucaaacaauuccuggacuu

SEQ ID NO: 15769 - RNA, 19 nt, Artificial Sequence
  Synthetic
guugguauaugcagaguuu

SEQ ID NO: 15770 - RNA, 19 nt, Artificial Sequence
  Synthetic
ggugaaucuugaagucauu

SEQ ID NO: 15771 - RNA, 19 nt, Artificial Sequence
  Synthetic
gucauuaugcuaagugaaa

SEQ ID NO: 15772 - RNA, 19 nt, Artificial Sequence
  Synthetic
uggcuaacacaaugagaga

SEQ ID NO: 15773 - RNA, 19 nt, Artificial Sequence
  Synthetic
uugaauacaaggagaaguu

SEQ ID NO: 15774 - RNA, 19 nt, Artificial Sequence
  Synthetic
caacaugggugaaucuuga

SEQ ID NO: 15775 - RNA, 19 nt, Artificial Sequence
  Synthetic
caucaaaguucgaaauaga

SEQ ID NO: 15776 - RNA, 19 nt, Artificial Sequence
  Synthetic
ccaacauucugaaggaaau

SEQ ID NO: 15777 - RNA, 19 nt, Artificial Sequence
  Synthetic
uuacacaagugaauggaaa

SEQ ID NO: 15778 - RNA, 19 nt, Artificial Sequence
  Synthetic
gugcaagacuacaggaguu

SEQ ID NO: 15779 - RNA, 19 nt, Artificial Sequence
  Synthetic
cauuaagauuucagacaga

SEQ ID NO: 15780 - RNA, 19 nt, Artificial Sequence
  Synthetic
auacagagccugauggauu

SEQ ID NO: 15781 - RNA, 19 nt, Artificial Sequence
  Synthetic
cuacaauggcacaaggaau

SEQ ID NO: 15782 - RNA, 19 nt, Artificial Sequence
  Synthetic
acaaggaaucauagaguau

SEQ ID NO: 15783 - RNA, 19 nt, Artificial Sequence
  Synthetic
ggacuuugguucagaaaau

SEQ ID NO: 15784 - RNA, 19 nt, Artificial Sequence
  Synthetic
cccgagagguggagcauuu

SEQ ID NO: 15785 - RNA, 19 nt, Artificial Sequence
  Synthetic
ccaaguacuuucaaggaga

SEQ ID NO: 15786 - RNA, 19 nt, Artificial Sequence
  Synthetic
agaaaaugcaugugaaaga

SEQ ID NO: 15787 - RNA, 19 nt, Artificial Sequence
  Synthetic
cuucagugcaauugguuaa

SEQ ID NO: 15788 - RNA, 19 nt, Artificial Sequence
  Synthetic
agacagaggaggugguguu

SEQ ID NO: 15789 - RNA, 19 nt, Artificial Sequence
  Synthetic
ccugaauguuuguguguga

SEQ ID NO: 15790 - RNA, 19 nt, Artificial Sequence
  Synthetic
ugauggauuugguggaauu

SEQ ID NO: 15791 - RNA, 19 nt, Artificial Sequence
  Synthetic
caguugaacaccaggaaaa

SEQ ID NO: 15792 - RNA, 19 nt, Artificial Sequence
  Synthetic
aaccaaagaaccuggcaaa

SEQ ID NO: 15793 - RNA, 19 nt, Artificial Sequence
  Synthetic
aagaagaccuuaccauuaa

SEQ ID NO: 15794 - RNA, 19 nt, Artificial Sequence
  Synthetic
cgacaagaauugccuguga

SEQ ID NO: 15795 - RNA, 19 nt, Artificial Sequence
  Synthetic
aaagaagaccuuaccauua

SEQ ID NO: 15796 - RNA, 19 nt, Artificial Sequence
  Synthetic
aagaauugccugugagacu

SEQ ID NO: 15797 - RNA, 19 nt, Artificial Sequence
  Synthetic
ccagaugaccagaaagcau

SEQ ID NO: 15798 - RNA, 19 nt, Artificial Sequence
  Synthetic
gccaacauucugaaggaaa

SEQ ID NO: 15799 - RNA, 19 nt, Artificial Sequence
  Synthetic
uuauuguugucuugggaaa

SEQ ID NO: 15800 - RNA, 19 nt, Artificial Sequence
  Synthetic
guauaaagaugccuguaca

SEQ ID NO: 15801 - RNA, 19 nt, Artificial Sequence
  Synthetic
ucauaugcucuuugaacua

SEQ ID NO: 15802 - RNA, 19 nt, Artificial Sequence
  Synthetic
acacugauccaaugaggaa

SEQ ID NO: 15803 - RNA, 19 nt, Artificial Sequence
  Synthetic
uaagaaagggagugagugu

SEQ ID NO: 15804 - RNA, 19 nt, Artificial Sequence
  Synthetic
agaaagggagugaguguga

SEQ ID NO: 15805 - RNA, 19 nt, Artificial Sequence
  Synthetic
gugaggaaauggaaggaua

SEQ ID NO: 15806 - RNA, 19 nt, Artificial Sequence
  Synthetic
caagagaccucguggagaa

SEQ ID NO: 15807 - RNA, 19 nt, Artificial Sequence
  Synthetic
gaucacagauuuuggaaca

SEQ ID NO: 15808 - RNA, 19 nt, Artificial Sequence
  Synthetic
gcgguuaggcugugaggaa

SEQ ID NO: 15809 - RNA, 19 nt, Artificial Sequence
  Synthetic
ccagagaauaugcgauuaa

SEQ ID NO: 15810 - RNA, 19 nt, Artificial Sequence
  Synthetic
gaccagaggccaagaauuu

SEQ ID NO: 15811 - RNA, 19 nt, Artificial Sequence
  Synthetic
gcagcaacauagagcagua

SEQ ID NO: 15812 - RNA, 19 nt, Artificial Sequence
  Synthetic
ccgaagaugagaagagguu

SEQ ID NO: 15813 - RNA, 19 nt, Artificial Sequence
  Synthetic
uggauaagcggaaggguuu

SEQ ID NO: 15814 - RNA, 19 nt, Artificial Sequence
  Synthetic
gguuaggcugugaggaaau

SEQ ID NO: 15815 - RNA, 19 nt, Artificial Sequence
  Synthetic
cacaaguggugcaggaaga

SEQ ID NO: 15816 - RNA, 19 nt, Artificial Sequence
  Synthetic
cggccuuaguuaugccaaa

SEQ ID NO: 15817 - RNA, 19 nt, Artificial Sequence
  Synthetic
gcggaaaccuugcagcauu

SEQ ID NO: 15818 - RNA, 19 nt, Artificial Sequence
  Synthetic
cggaaggguuuauuugcaa

SEQ ID NO: 15819 - RNA, 19 nt, Artificial Sequence
  Synthetic
agaugggcccaguggauaa

SEQ ID NO: 15820 - RNA, 19 nt, Artificial Sequence
  Synthetic
cuguaagaguucagaccuu

SEQ ID NO: 15821 - RNA, 19 nt, Artificial Sequence
  Synthetic
guggauaagcggaaggguu

SEQ ID NO: 15822 - RNA, 19 nt, Artificial Sequence
  Synthetic
gguuguuguuggagaagca

SEQ ID NO: 15823 - RNA, 19 nt, Artificial Sequence
  Synthetic
cggaaaccuugcagcauuu

SEQ ID NO: 15824 - RNA, 19 nt, Artificial Sequence
  Synthetic
agagguuguuguuggagaa

SEQ ID NO: 15825 - RNA, 19 nt, Artificial Sequence
  Synthetic
acaaaguucugaaagguga

SEQ ID NO: 15826 - RNA, 19 nt, Artificial Sequence
  Synthetic
cgguuaggcugugaggaaa

SEQ ID NO: 15827 - RNA, 19 nt, Artificial Sequence
  Synthetic
cagaaggaccacauuuaua

SEQ ID NO: 15828 - RNA, 19 nt, Artificial Sequence
  Synthetic
gcucuuggaugcauaauau

SEQ ID NO: 15829 - RNA, 19 nt, Artificial Sequence
  Synthetic
cgacauaucauaaaagaga

SEQ ID NO: 15830 - RNA, 19 nt, Artificial Sequence
  Synthetic
gagaagcgacauaucauaa

SEQ ID NO: 15831 - RNA, 19 nt, Artificial Sequence
  Synthetic
gcaccaguuuguagaaaau

SEQ ID NO: 15832 - RNA, 19 nt, Artificial Sequence
  Synthetic
acauagagcaguacauuca

SEQ ID NO: 15833 - RNA, 19 nt, Artificial Sequence
  Synthetic
ggagaagcgacauaucaua

SEQ ID NO: 15834 - RNA, 19 nt, Artificial Sequence
  Synthetic
cggaagacgacgaggacug

SEQ ID NO: 15835 - RNA, 19 nt, Artificial Sequence
  Synthetic
auaacaaaguggucacaaa

SEQ ID NO: 15836 - RNA, 19 nt, Artificial Sequence
  Synthetic
gguuuugggauuugagauu

SEQ ID NO: 15837 - RNA, 19 nt, Artificial Sequence
  Synthetic
gaggaagccuugcggguga

SEQ ID NO: 15838 - RNA, 19 nt, Artificial Sequence
  Synthetic
agucagaggaggaggaauc

SEQ ID NO: 15839 - RNA, 19 nt, Artificial Sequence
  Synthetic
ggcugaacaacaugaauaa

SEQ ID NO: 15840 - RNA, 19 nt, Artificial Sequence
  Synthetic
aggcugaacaacaugaaua

SEQ ID NO: 15841 - RNA, 19 nt, Artificial Sequence
  Synthetic
gugcagagcaaaagggaca

SEQ ID NO: 15842 - RNA, 19 nt, Artificial Sequence
  Synthetic
gaccgaaacuugauauuuu

SEQ ID NO: 15843 - RNA, 19 nt, Artificial Sequence
  Synthetic
uggccauggugguggacau

SEQ ID NO: 15844 - RNA, 19 nt, Artificial Sequence
  Synthetic
ccggauggacauucgcaaa

SEQ ID NO: 15845 - RNA, 19 nt, Artificial Sequence
  Synthetic
cggauggugcagagcaaaa

SEQ ID NO: 15846 - RNA, 19 nt, Artificial Sequence
  Synthetic
ccaaccaguuugaggccga

SEQ ID NO: 15847 - RNA, 19 nt, Artificial Sequence
  Synthetic
ggaagggccaagugcugaa

SEQ ID NO: 15848 - RNA, 19 nt, Artificial Sequence
  Synthetic
cgauguacgucccggagga

SEQ ID NO: 15849 - RNA, 19 nt, Artificial Sequence
  Synthetic
acauguaacgucugccuua

SEQ ID NO: 15850 - RNA, 19 nt, Artificial Sequence
  Synthetic
acuacgugcucacagguua

SEQ ID NO: 15851 - RNA, 19 nt, Artificial Sequence
  Synthetic
gggagucagaggaggagga

SEQ ID NO: 15852 - RNA, 19 nt, Artificial Sequence
  Synthetic
acagguuauacgagggaca

SEQ ID NO: 15853 - RNA, 19 nt, Artificial Sequence
  Synthetic
ccaguuugaggccgaguua

SEQ ID NO: 15854 - RNA, 19 nt, Artificial Sequence
  Synthetic
ugcggauggugcagagcaa

SEQ ID NO: 15855 - RNA, 19 nt, Artificial Sequence
  Synthetic
uaacaaaguggucacaaaa

SEQ ID NO: 15856 - RNA, 19 nt, Artificial Sequence
  Synthetic
caucgaggacccagagauc

SEQ ID NO: 15857 - RNA, 19 nt, Artificial Sequence
  Synthetic
caagguggccugugagaag

SEQ ID NO: 15858 - RNA, 19 nt, Artificial Sequence
  Synthetic
ccauggugguggacauugu

SEQ ID NO: 15859 - RNA, 19 nt, Artificial Sequence
  Synthetic
ccagucgugcuuugugaaa

SEQ ID NO: 15860 - RNA, 19 nt, Artificial Sequence
  Synthetic
gauccagucuugggugaca

SEQ ID NO: 15861 - RNA, 19 nt, Artificial Sequence
  Synthetic
gcugaacaacaugaauaaa

SEQ ID NO: 15862 - RNA, 19 nt, Artificial Sequence
  Synthetic
gcagaggaccauccagugu

SEQ ID NO: 15863 - RNA, 19 nt, Artificial Sequence
  Synthetic
uggacaugcugcacucuau

SEQ ID NO: 15864 - RNA, 19 nt, Artificial Sequence
  Synthetic
gggcagcaacuaccugauu

SEQ ID NO: 15865 - RNA, 19 nt, Artificial Sequence
  Synthetic
ccacaaagcucacacgaua

SEQ ID NO: 15866 - RNA, 19 nt, Artificial Sequence
  Synthetic
gggaaaagguucuggaaga

SEQ ID NO: 15867 - RNA, 19 nt, Artificial Sequence
  Synthetic
ccggacagguaguaagaua

SEQ ID NO: 15868 - RNA, 19 nt, Artificial Sequence
  Synthetic
ggagaugaccuaugaagaa

SEQ ID NO: 15869 - RNA, 19 nt, Artificial Sequence
  Synthetic
gggagaagccugagaaugu

SEQ ID NO: 15870 - RNA, 19 nt, Artificial Sequence
  Synthetic
augaagaaauccaggaaca

SEQ ID NO: 15871 - RNA, 19 nt, Artificial Sequence
  Synthetic
uaaagagaauugagugcua

SEQ ID NO: 15872 - RNA, 19 nt, Artificial Sequence
  Synthetic
gacgagaggcagugagcua

SEQ ID NO: 15873 - RNA, 19 nt, Artificial Sequence
  Synthetic
uggccuauuuccuggauaa

SEQ ID NO: 15874 - RNA, 19 nt, Artificial Sequence
  Synthetic
gcuacaagaacuaugaauu

SEQ ID NO: 15875 - RNA, 19 nt, Artificial Sequence
  Synthetic
aagaaauccaggaacauua

SEQ ID NO: 15876 - RNA, 19 nt, Artificial Sequence
  Synthetic
aaacaucaggcaagugaaa

SEQ ID NO: 15877 - RNA, 19 nt, Artificial Sequence
  Synthetic
gagaugaccuaugaagaaa

SEQ ID NO: 15878 - RNA, 19 nt, Artificial Sequence
  Synthetic
gauaggaacaccaacuaaa

SEQ ID NO: 15879 - RNA, 19 nt, Artificial Sequence
  Synthetic
gauaauggagcuagaacga

SEQ ID NO: 15880 - RNA, 19 nt, Artificial Sequence
  Synthetic
ggaacauuacccugaagaa

SEQ ID NO: 15881 - RNA, 19 nt, Artificial Sequence
  Synthetic
gaacaugguuacaaggugu

SEQ ID NO: 15882 - RNA, 19 nt, Artificial Sequence
  Synthetic
gcucgaggcaagaccuaua

SEQ ID NO: 15883 - RNA, 19 nt, Artificial Sequence
  Synthetic
cagugauaauggagcuaga

SEQ ID NO: 15884 - RNA, 19 nt, Artificial Sequence
  Synthetic
cuaucuagcucuggaggaa

SEQ ID NO: 15885 - RNA, 19 nt, Artificial Sequence
  Synthetic
gaacauuacccugaagaau

SEQ ID NO: 15886 - RNA, 19 nt, Artificial Sequence
  Synthetic
ggauaggaacaccaacuaa

SEQ ID NO: 15887 - RNA, 19 nt, Artificial Sequence
  Synthetic
uaauggagcuagaacgaca

SEQ ID NO: 15888 - RNA, 19 nt, Artificial Sequence
  Synthetic
cgacauggcgagagugaac

SEQ ID NO: 15889 - RNA, 19 nt, Artificial Sequence
  Synthetic
uggugaucaugguggguuu

SEQ ID NO: 15890 - RNA, 19 nt, Artificial Sequence
  Synthetic
acugcgagaccaagauaaa

SEQ ID NO: 15891 - RNA, 19 nt, Artificial Sequence
  Synthetic
uuguaaugacccuggcaua

SEQ ID NO: 15892 - RNA, 19 nt, Artificial Sequence
  Synthetic
caacacuaccagagaacga

SEQ ID NO: 15893 - RNA, 19 nt, Artificial Sequence
  Synthetic
agcuagaacgacaggagaa

SEQ ID NO: 15894 - RNA, 19 nt, Artificial Sequence
  Synthetic
ggaaauuucuggaggaaca

SEQ ID NO: 15895 - RNA, 19 nt, Artificial Sequence
  Synthetic
ccaauauucuggagguuaa

SEQ ID NO: 15896 - RNA, 19 nt, Artificial Sequence
  Synthetic
ccugaaaggaacagagaga

SEQ ID NO: 15897 - RNA, 19 nt, Artificial Sequence
  Synthetic
acacagaacaugagguuau

SEQ ID NO: 15898 - RNA, 19 nt, Artificial Sequence
  Synthetic
uggccuacuucuuggauaa

SEQ ID NO: 15899 - RNA, 19 nt, Artificial Sequence
  Synthetic
ccucagaacagaacaacaa

SEQ ID NO: 15900 - RNA, 19 nt, Artificial Sequence
  Synthetic
gaacuuugcugaacagaau

SEQ ID NO: 15901 - RNA, 19 nt, Artificial Sequence
  Synthetic
ggaaauaacagaccucaaa

SEQ ID NO: 15902 - RNA, 19 nt, Artificial Sequence
  Synthetic
ugcccaagcucuaaggaaa

SEQ ID NO: 15903 - RNA, 19 nt, Artificial Sequence
  Synthetic
ggugcaaaguggaaacaau

SEQ ID NO: 15904 - RNA, 19 nt, Artificial Sequence
  Synthetic
aggacuacauccagagcaa

SEQ ID NO: 15905 - RNA, 19 nt, Artificial Sequence
  Synthetic
gggacaugauuuugaacuu

SEQ ID NO: 15906 - RNA, 19 nt, Artificial Sequence
  Synthetic
caauaaggcguccaagaaa

SEQ ID NO: 15907 - RNA, 19 nt, Artificial Sequence
  Synthetic
ccaagaaacuaacacgcua

SEQ ID NO: 15908 - RNA, 19 nt, Artificial Sequence
  Synthetic
gcaaaguggaaacaauuaa

SEQ ID NO: 15909 - RNA, 19 nt, Artificial Sequence
  Synthetic
gagagaacgugauggagga

SEQ ID NO: 15910 - RNA, 19 nt, Artificial Sequence
  Synthetic
gugcaaaguggaaacaauu

SEQ ID NO: 15911 - RNA, 19 nt, Artificial Sequence
  Synthetic
gagaauugaaugcuacaaa

SEQ ID NO: 15912 - RNA, 19 nt, Artificial Sequence
  Synthetic
ugaagagaauugaaugcua

SEQ ID NO: 15913 - RNA, 19 nt, Artificial Sequence
  Synthetic
guaaggaugagaaggaaca

SEQ ID NO: 15914 - RNA, 19 nt, Artificial Sequence
  Synthetic
ucuacuaccucaugaauau

SEQ ID NO: 15915 - RNA, 19 nt, Artificial Sequence
  Synthetic
agaacgugauggaggacuu

SEQ ID NO: 15916 - RNA, 19 nt, Artificial Sequence
  Synthetic
augagaaggaacagcuuua

SEQ ID NO: 15917 - RNA, 19 nt, Artificial Sequence
  Synthetic
aauaaggcguccaagaaau

SEQ ID NO: 15918 - RNA, 19 nt, Artificial Sequence
  Synthetic
gugaagaggaccauacaga

SEQ ID NO: 15919 - RNA, 19 nt, Artificial Sequence
  Synthetic
cuaugcagagauugagaaa

SEQ ID NO: 15920 - RNA, 19 nt, Artificial Sequence
  Synthetic
gcccaagcucuaaggaaau

SEQ ID NO: 15921 - RNA, 19 nt, Artificial Sequence
  Synthetic
ugaaaggaacagagagaac

SEQ ID NO: 15922 - RNA, 19 nt, Artificial Sequence
  Synthetic
ccuguaaggaugagaagga

SEQ ID NO: 15923 - RNA, 19 nt, Artificial Sequence
  Synthetic
cccuaugagcaguggaaga

SEQ ID NO: 15924 - RNA, 19 nt, Artificial Sequence
  Synthetic
uguagaagcuguagagaua

SEQ ID NO: 15925 - RNA, 19 nt, Artificial Sequence
  Synthetic
ucucaaagcuugugccaaa

SEQ ID NO: 15926 - RNA, 19 nt, Artificial Sequence
  Synthetic
gggcaaagcucuuccauuu

SEQ ID NO: 15927 - RNA, 19 nt, Artificial Sequence
  Synthetic
gaauuaaugaccugggaua

SEQ ID NO: 15928 - RNA, 19 nt, Artificial Sequence
  Synthetic
ugaaauacauggacgaaaa

SEQ ID NO: 15929 - RNA, 19 nt, Artificial Sequence
  Synthetic
ccaauaucauggaaguuaa

SEQ ID NO: 15930 - RNA, 19 nt, Artificial Sequence
  Synthetic
ggucagaggaugcaaagaa

SEQ ID NO: 15931 - RNA, 19 nt, Artificial Sequence
  Synthetic
cggcagaagccauggacga

SEQ ID NO: 15932 - RNA, 19 nt, Artificial Sequence
  Synthetic
uuagauagggagagaggua

SEQ ID NO: 15933 - RNA, 19 nt, Artificial Sequence
  Synthetic
ggagagagguaacaugaau

SEQ ID NO: 15934 - RNA, 19 nt, Artificial Sequence
  Synthetic
gggcuuagauagggagaga

SEQ ID NO: 15935 - RNA, 19 nt, Artificial Sequence
  Synthetic
ggugagggugggagauuua

SEQ ID NO: 15936 - RNA, 19 nt, Artificial Sequence
  Synthetic
caggagaugccuucagaaa

SEQ ID NO: 15937 - RNA, 19 nt, Artificial Sequence
  Synthetic
acaccuacccugaggagua

SEQ ID NO: 15938 - RNA, 19 nt, Artificial Sequence
  Synthetic
ggugcaugauugugcuuaa

SEQ ID NO: 15939 - RNA, 19 nt, Artificial Sequence
  Synthetic
ccuaguugcugaaaguuaa

SEQ ID NO: 15940 - RNA, 19 nt, Artificial Sequence
  Synthetic
ggauaagagugcagaggag

SEQ ID NO: 15941 - RNA, 19 nt, Artificial Sequence
  Synthetic
gcaaguucguggaggagca

SEQ ID NO: 15942 - RNA, 19 nt, Artificial Sequence
  Synthetic
gugcagaggagaugcccua

SEQ ID NO: 15943 - RNA, 19 nt, Artificial Sequence
  Synthetic
ccaagaagcugacucgcua

SEQ ID NO: 15944 - RNA, 19 nt, Artificial Sequence
  Synthetic
gagaagagccguugcuguu

SEQ ID NO: 15945 - RNA, 19 nt, Artificial Sequence
  Synthetic
gaacugaggcugugcuuca

SEQ ID NO: 15946 - RNA, 19 nt, Artificial Sequence
  Synthetic
gggagcaggacaaguacua

SEQ ID NO: 15947 - RNA, 19 nt, Artificial Sequence
  Synthetic
gcuuggagccagugaucau

SEQ ID NO: 15948 - RNA, 19 nt, Artificial Sequence
  Synthetic
uugccuacuuccuggauaa

SEQ ID NO: 15949 - RNA, 19 nt, Artificial Sequence
  Synthetic
cuucagaaagcuuuguaua

SEQ ID NO: 15950 - RNA, 19 nt, Artificial Sequence
  Synthetic
accaauacuacuagagaga

SEQ ID NO: 15951 - RNA, 19 nt, Artificial Sequence
  Synthetic
ugagcaaguucguggagga

SEQ ID NO: 15952 - RNA, 19 nt, Artificial Sequence
  Synthetic
ccucggagaccuucacaaa

SEQ ID NO: 15953 - RNA, 19 nt, Artificial Sequence
  Synthetic
gaugaaaccauuuggaaac

SEQ ID NO: 15954 - RNA, 19 nt, Artificial Sequence
  Synthetic
acgaggaaauucaggauaa

SEQ ID NO: 15955 - RNA, 19 nt, Artificial Sequence
  Synthetic
ggaaaugaccuacgaggaa

SEQ ID NO: 15956 - RNA, 19 nt, Artificial Sequence
  Synthetic
ccuacaaugugaaaggaaa

SEQ ID NO: 15957 - RNA, 19 nt, Artificial Sequence
  Synthetic
ccaagaagcugacucgaua

SEQ ID NO: 15958 - RNA, 19 nt, Artificial Sequence
  Synthetic
ccgcaugggcugaggugua

SEQ ID NO: 15959 - RNA, 19 nt, Artificial Sequence
  Synthetic
gaaacaugcauuugccaua

SEQ ID NO: 15960 - RNA, 19 nt, Artificial Sequence
  Synthetic
caacaucgugcaagugaaa

SEQ ID NO: 15961 - RNA, 19 nt, Artificial Sequence
  Synthetic
gaucugaaggucuggacaa

SEQ ID NO: 15962 - RNA, 19 nt, Artificial Sequence
  Synthetic
cagcauucuuugcaauaaa

SEQ ID NO: 15963 - RNA, 19 nt, Artificial Sequence
  Synthetic
gcacgugagucuggugaaa

SEQ ID NO: 15964 - RNA, 19 nt, Artificial Sequence
  Synthetic
gggcugagguguagcugau

SEQ ID NO: 15965 - RNA, 19 nt, Artificial Sequence
  Synthetic
gaaaugaccuacgaggaaa

SEQ ID NO: 15966 - RNA, 19 nt, Artificial Sequence
  Synthetic
guucaauguuggccaguau

SEQ ID NO: 15967 - RNA, 19 nt, Artificial Sequence
  Synthetic
agccagaugaagaggacaa

SEQ ID NO: 15968 - RNA, 19 nt, Artificial Sequence
  Synthetic
ucauggagcuggagaggca

SEQ ID NO: 15969 - RNA, 19 nt, Artificial Sequence
  Synthetic
ggagaaggcagaacccaua

SEQ ID NO: 15970 - RNA, 19 nt, Artificial Sequence
  Synthetic
gggcauucaugaaagcaau

SEQ ID NO: 15971 - RNA, 19 nt, Artificial Sequence
  Synthetic
acauugggaugcacagaaa

SEQ ID NO: 15972 - RNA, 19 nt, Artificial Sequence
  Synthetic
uggacaagccagaugaaga

SEQ ID NO: 15973 - RNA, 19 nt, Artificial Sequence
  Synthetic
cagaauggaugguauugaa

SEQ ID NO: 15974 - RNA, 19 nt, Artificial Sequence
  Synthetic
gcuggagaggcaagagaau

SEQ ID NO: 15975 - RNA, 19 nt, Artificial Sequence
  Synthetic
ggaaagugcuugcugugau

SEQ ID NO: 15976 - RNA, 19 nt, Artificial Sequence
  Synthetic
cauuaggacugcagccuuu

SEQ ID NO: 15977 - RNA, 19 nt, Artificial Sequence
  Synthetic
gcauugagugcuaugagaa

SEQ ID NO: 15978 - RNA, 19 nt, Artificial Sequence
  Synthetic
guauauuaccucaugaaca

SEQ ID NO: 15979 - RNA, 19 nt, Artificial Sequence
  Synthetic
caaugaagagggccugaaa

SEQ ID NO: 15980 - RNA, 19 nt, Artificial Sequence
  Synthetic
cgaggaaauucaggauaau

SEQ ID NO: 15981 - RNA, 19 nt, Artificial Sequence
  Synthetic
gaacagaauggcuacaaga

SEQ ID NO: 15982 - RNA, 19 nt, Artificial Sequence
  Synthetic
aagaagaucuggaugccau

SEQ ID NO: 15983 - RNA, 19 nt, Artificial Sequence
  Synthetic
ggacaauccagacggcuga

SEQ ID NO: 15984 - RNA, 19 nt, Artificial Sequence
  Synthetic
cggagaagaugaagacaga

SEQ ID NO: 15985 - RNA, 19 nt, Artificial Sequence
  Synthetic
ucacugagcucaagaaaga

SEQ ID NO: 15986 - RNA, 19 nt, Artificial Sequence
  Synthetic
gagaacaacuggaacauuu

SEQ ID NO: 15987 - RNA, 19 nt, Artificial Sequence
  Synthetic
gagaagaugaagacagaca

SEQ ID NO: 15988 - RNA, 19 nt, Artificial Sequence
  Synthetic
ccacggaguuccuguacaa

SEQ ID NO: 15989 - RNA, 19 nt, Artificial Sequence
  Synthetic
gggagaacuucauguguga

SEQ ID NO: 15990 - RNA, 19 nt, Artificial Sequence
  Synthetic
ggguagaggucgagagucc

SEQ ID NO: 15991 - RNA, 19 nt, Artificial Sequence
  Synthetic
ugaccaaggaagugcagaa

SEQ ID NO: 15992 - RNA, 19 nt, Artificial Sequence
  Synthetic
ugaagaugcuggcacaaua

SEQ ID NO: 15993 - RNA, 19 nt, Artificial Sequence
  Synthetic
gcacaauaccgcaucagua

SEQ ID NO: 15994 - RNA, 19 nt, Artificial Sequence
  Synthetic
ggaugagaagcauguguaa

SEQ ID NO: 15995 - RNA, 19 nt, Artificial Sequence
  Synthetic
gugcaucggucuccggaaa

SEQ ID NO: 15996 - RNA, 19 nt, Artificial Sequence
  Synthetic
gugggagcuucgagaacaa

SEQ ID NO: 15997 - RNA, 19 nt, Artificial Sequence
  Synthetic
agaaagccauggaugacaa

SEQ ID NO: 15998 - RNA, 19 nt, Artificial Sequence
  Synthetic
aggucaacguggagcacau

SEQ ID NO: 15999 - RNA, 19 nt, Artificial Sequence
  Synthetic
gggacaggaaagaggaagu

SEQ ID NO: 16000 - RNA, 19 nt, Artificial Sequence
  Synthetic
gaagaugaagacagacauu

SEQ ID NO: 16001 - RNA, 19 nt, Artificial Sequence
  Synthetic
gggucaggugcaagaagua

SEQ ID NO: 16002 - RNA, 19 nt, Artificial Sequence
  Synthetic
ccaaagucuuccucaucua

SEQ ID NO: 16003 - RNA, 19 nt, Artificial Sequence
  Synthetic
ugaucggccugaagaagaa

SEQ ID NO: 16004 - RNA, 19 nt, Artificial Sequence
  Synthetic
acuuaaaggucaacgugga

SEQ ID NO: 16005 - RNA, 19 nt, Artificial Sequence
  Synthetic
ccagagaggcccugugguu

SEQ ID NO: 16006 - RNA, 19 nt, Artificial Sequence
  Synthetic
agaagcugcgcgagguuua

SEQ ID NO: 16007 - RNA, 19 nt, Artificial Sequence
  Synthetic
ccaaggaagugcagaaagc

SEQ ID NO: 16008 - RNA, 19 nt, Artificial Sequence
  Synthetic
gcugguggucgguggguuu

SEQ ID NO: 16009 - RNA, 19 nt, Artificial Sequence
  Synthetic
uaaccaggguagaggucga

SEQ ID NO: 16010 - RNA, 19 nt, Artificial Sequence
  Synthetic
cauuuaugugggugccaaa

SEQ ID NO: 16011 - RNA, 19 nt, Artificial Sequence
  Synthetic
caucagagggcaagggcgu

SEQ ID NO: 16012 - RNA, 19 nt, Artificial Sequence
  Synthetic
ccauggaugacaagagguu

SEQ ID NO: 16013 - RNA, 19 nt, Artificial Sequence
  Synthetic
ggagagcggaugagaagca

SEQ ID NO: 16014 - RNA, 19 nt, Artificial Sequence
  Synthetic
ucaagaaucuggugguuaa

SEQ ID NO: 16015 - RNA, 19 nt, Artificial Sequence
  Synthetic
ggaaaaucaaagagaguua

SEQ ID NO: 16016 - RNA, 19 nt, Artificial Sequence
  Synthetic
ggauaugacacccggguua

SEQ ID NO: 16017 - RNA, 19 nt, Artificial Sequence
  Synthetic
gcucuaaacuugggacuaa

SEQ ID NO: 16018 - RNA, 19 nt, Artificial Sequence
  Synthetic
gugcaaaagaugaaaacaa

SEQ ID NO: 16019 - RNA, 19 nt, Artificial Sequence
  Synthetic
ugguuaagcgucugggaua

SEQ ID NO: 16020 - RNA, 19 nt, Artificial Sequence
  Synthetic
ccagaggacauuuguguua

SEQ ID NO: 16021 - RNA, 19 nt, Artificial Sequence
  Synthetic
ugaccaaagaugugaccaa

SEQ ID NO: 16022 - RNA, 19 nt, Artificial Sequence
  Synthetic
ccuaauaaguccacaucuu

SEQ ID NO: 16023 - RNA, 19 nt, Artificial Sequence
  Synthetic
cagaagacaucaagaaucu

SEQ ID NO: 16024 - RNA, 19 nt, Artificial Sequence
  Synthetic
gaacuggaugucugggaaa

SEQ ID NO: 16025 - RNA, 19 nt, Artificial Sequence
  Synthetic
ggagugacuuguugaguga

SEQ ID NO: 16026 - RNA, 19 nt, Artificial Sequence
  Synthetic
ccucagaagacaucaagaa

SEQ ID NO: 16027 - RNA, 19 nt, Artificial Sequence
  Synthetic
ggaagaaugugcuugguca

SEQ ID NO: 16028 - RNA, 19 nt, Artificial Sequence
  Synthetic
ccagacagauuuugagcau

SEQ ID NO: 16029 - RNA, 19 nt, Artificial Sequence
  Synthetic
gaugaaaacaacugugaaa

SEQ ID NO: 16030 - RNA, 19 nt, Artificial Sequence
  Synthetic
aggccauggaugagaagaa

SEQ ID NO: 16031 - RNA, 19 nt, Artificial Sequence
  Synthetic
cugaaggaccagacagauu

SEQ ID NO: 16032 - RNA, 19 nt, Artificial Sequence
  Synthetic
ggacauuuguguuagaagu

SEQ ID NO: 16033 - RNA, 19 nt, Artificial Sequence
  Synthetic
ccauggaugagaagaaauu

SEQ ID NO: 16034 - RNA, 19 nt, Artificial Sequence
  Synthetic
ugaccaaggccauggauga

SEQ ID NO: 16035 - RNA, 19 nt, Artificial Sequence
  Synthetic
gugcaaggacuuucgggaa

SEQ ID NO: 16036 - RNA, 19 nt, Artificial Sequence
  Synthetic
gguuaagcgucugggauau

SEQ ID NO: 16037 - RNA, 19 nt, Artificial Sequence
  Synthetic
gcaauugacaagaauggaa

SEQ ID NO: 16038 - RNA, 19 nt, Artificial Sequence
  Synthetic
caauugacaagaauggaaa

SEQ ID NO: 16039 - RNA, 19 nt, Artificial Sequence
  Synthetic
ccagaaagcagguaagauc

SEQ ID NO: 16040 - RNA, 19 nt, Artificial Sequence
  Synthetic
cugcaucggaucauggaaa

SEQ ID NO: 16041 - RNA, 19 nt, Artificial Sequence
  Synthetic
uggcugagcugaaggacca

SEQ ID NO: 16042 - RNA, 19 nt, Artificial Sequence
  Synthetic
caacaaugucccuggcuca

SEQ ID NO: 16043 - RNA, 19 nt, Artificial Sequence
  Synthetic
ccaagaagagcuuugaaca

SEQ ID NO: 16044 - RNA, 19 nt, Artificial Sequence
  Synthetic
gugcauaugagcagaauua

SEQ ID NO: 16045 - RNA, 19 nt, Artificial Sequence
  Synthetic
aaugagagcugcagugaaa

SEQ ID NO: 16046 - RNA, 19 nt, Artificial Sequence
  Synthetic
ggaagaacgugcuggguca

SEQ ID NO: 16047 - RNA, 19 nt, Artificial Sequence
  Synthetic
gggagaagcacgaggaguu

SEQ ID NO: 16048 - RNA, 19 nt, Artificial Sequence
  Synthetic
ggaaguacuuggaagagau

SEQ ID NO: 16049 - RNA, 19 nt, Artificial Sequence
  Synthetic
guguuugacugcaggaaga

SEQ ID NO: 16050 - RNA, 19 nt, Artificial Sequence
  Synthetic
gcauaugagcagaauuaau

SEQ ID NO: 16051 - RNA, 19 nt, Artificial Sequence
  Synthetic
ccauuugugugcugggaau

SEQ ID NO: 16052 - RNA, 19 nt, Artificial Sequence
  Synthetic
gcacaggauucccaaagaa

SEQ ID NO: 16053 - RNA, 19 nt, Artificial Sequence
  Synthetic
gggaaguacuuggaagaga

SEQ ID NO: 16054 - RNA, 19 nt, Artificial Sequence
  Synthetic
gggccaaccucuuccggaa

SEQ ID NO: 16055 - RNA, 19 nt, Artificial Sequence
  Synthetic
ggagaaccgugcccggaaa

SEQ ID NO: 16056 - RNA, 19 nt, Artificial Sequence
  Synthetic
auaaggaggccgugcagaa

SEQ ID NO: 16057 - RNA, 19 nt, Artificial Sequence
  Synthetic
agaaauacgccuaccucaa

SEQ ID NO: 16058 - RNA, 19 nt, Artificial Sequence
  Synthetic
aggaggccgugcagaaaua

SEQ ID NO: 16059 - RNA, 19 nt, Artificial Sequence
  Synthetic
uggaggagcuggccaggaa

SEQ ID NO: 16060 - RNA, 19 nt, Artificial Sequence
  Synthetic
aggaacggccagaucgaua

SEQ ID NO: 16061 - RNA, 19 nt, Artificial Sequence
  Synthetic
gcugaaggagcaauugaua

SEQ ID NO: 16062 - RNA, 19 nt, Artificial Sequence
  Synthetic
gauagaaacuuuggaacca

SEQ ID NO: 16063 - RNA, 19 nt, Artificial Sequence
  Synthetic
caaagaaaucggcuggaca

SEQ ID NO: 16064 - RNA, 19 nt, Artificial Sequence
  Synthetic
gcaugggaguggaggcagu

SEQ ID NO: 16065 - RNA, 19 nt, Artificial Sequence
  Synthetic
ggagcagaugugugucaaa

SEQ ID NO: 16066 - RNA, 19 nt, Artificial Sequence
  Synthetic
uggaagagaucgccacaca

SEQ ID NO: 16067 - RNA, 19 nt, Artificial Sequence
  Synthetic
gcuccauucuugggacaaa

SEQ ID NO: 16068 - RNA, 19 nt, Artificial Sequence
  Synthetic
gggccaagguguacuucau

SEQ ID NO: 16069 - RNA, 19 nt, Artificial Sequence
  Synthetic
gcgauggacgagaggagau

SEQ ID NO: 16070 - RNA, 19 nt, Artificial Sequence
  Synthetic
uguauucagaagagggcaa

SEQ ID NO: 16071 - RNA, 19 nt, Artificial Sequence
  Synthetic
aaagaacagugguggcuca

SEQ ID NO: 16072 - RNA, 19 nt, Artificial Sequence
  Synthetic
acccaucaccucugagaaa

SEQ ID NO: 16073 - RNA, 19 nt, Artificial Sequence
  Synthetic
gggaauaagcaaaagaaac

SEQ ID NO: 16074 - RNA, 19 nt, Artificial Sequence
  Synthetic
ggaauaaaguauagcagaa

SEQ ID NO: 16075 - RNA, 19 nt, Artificial Sequence
  Synthetic
ggguaaagcuuuucuauaa

SEQ ID NO: 16076 - RNA, 19 nt, Artificial Sequence
  Synthetic
ccaauaauaugaagggaau

SEQ ID NO: 16077 - RNA, 19 nt, Artificial Sequence
  Synthetic
gaacaaagacagggauaaa

SEQ ID NO: 16078 - RNA, 19 nt, Artificial Sequence
  Synthetic
agaacuacgugaagauuaa

SEQ ID NO: 16079 - RNA, 19 nt, Artificial Sequence
  Synthetic
aguuaaagcuggcagauuu

SEQ ID NO: 16080 - RNA, 19 nt, Artificial Sequence
  Synthetic
ccacauagcaugacuguuu

SEQ ID NO: 16081 - RNA, 19 nt, Artificial Sequence
  Synthetic
ucaaacagaugguaagaau

SEQ ID NO: 16082 - RNA, 19 nt, Artificial Sequence
  Synthetic
ggagaagucuguuuuguua

SEQ ID NO: 16083 - RNA, 19 nt, Artificial Sequence
  Synthetic
gcaggaagaagaagggaca

SEQ ID NO: 16084 - RNA, 19 nt, Artificial Sequence
  Synthetic
gaacucaaacagaugguaa

SEQ ID NO: 16085 - RNA, 19 nt, Artificial Sequence
  Synthetic
ucggagaagugaaauauaa

SEQ ID NO: 16086 - RNA, 19 nt, Artificial Sequence
  Synthetic
guucacacuucuucaguaa

SEQ ID NO: 16087 - RNA, 19 nt, Artificial Sequence
  Synthetic
ggaucaagacuaggaauua

SEQ ID NO: 16088 - RNA, 19 nt, Artificial Sequence
  Synthetic
uaagacaucuccuggaaua

SEQ ID NO: 16089 - RNA, 19 nt, Artificial Sequence
  Synthetic
gggauaaauugcuuacauu

SEQ ID NO: 16090 - RNA, 19 nt, Artificial Sequence
  Synthetic
ggaauagccugaacucaaa

SEQ ID NO: 16091 - RNA, 19 nt, Artificial Sequence
  Synthetic
aagagcaacugaugauuaa

SEQ ID NO: 16092 - RNA, 19 nt, Artificial Sequence
  Synthetic
ggaaggaucuuaugcuaca

SEQ ID NO: 16093 - RNA, 19 nt, Artificial Sequence
  Synthetic
gaauggacucagugaucaa

SEQ ID NO: 16094 - RNA, 19 nt, Artificial Sequence
  Synthetic
ugaucaggcugcaggaaga

SEQ ID NO: 16095 - RNA, 19 nt, Artificial Sequence
  Synthetic
ggaagucuuuagagguauu

SEQ ID NO: 16096 - RNA, 19 nt, Artificial Sequence
  Synthetic
aagagugacuagaaaguuu

SEQ ID NO: 16097 - RNA, 19 nt, Artificial Sequence
  Synthetic
aaagcaagguaaaugggaa

SEQ ID NO: 16098 - RNA, 19 nt, Artificial Sequence
  Synthetic
ccaaggaguugcugcuuuu

SEQ ID NO: 16099 - RNA, 19 nt, Artificial Sequence
  Synthetic
ugaaaugauccaaggaguu

SEQ ID NO: 16100 - RNA, 19 nt, Artificial Sequence
  Synthetic
acaaagacagggauaaauu

SEQ ID NO: 16101 - RNA, 19 nt, Artificial Sequence
  Synthetic
agaaagcacuggaauguuu

SEQ ID NO: 16102 - RNA, 19 nt, Artificial Sequence
  Synthetic
gaaaccagcuaaucaagua

SEQ ID NO: 16103 - RNA, 19 nt, Artificial Sequence
  Synthetic
cauaugaaaagcuggaaaa

SEQ ID NO: 16104 - RNA, 19 nt, Artificial Sequence
  Synthetic
acaaacaaccagaggauua

SEQ ID NO: 16105 - RNA, 19 nt, Artificial Sequence
  Synthetic
acagaaggcugguggguuu

SEQ ID NO: 16106 - RNA, 19 nt, Artificial Sequence
  Synthetic
agaauagaaucuugaggaa

SEQ ID NO: 16107 - RNA, 19 nt, Artificial Sequence
  Synthetic
gagcuaaaguugcagacaa

SEQ ID NO: 16108 - RNA, 19 nt, Artificial Sequence
  Synthetic
uggacaagcuggacguuaa

SEQ ID NO: 16109 - RNA, 19 nt, Artificial Sequence
  Synthetic
agucaaggcuuauaacaaa

SEQ ID NO: 16110 - RNA, 19 nt, Artificial Sequence
  Synthetic
ggacaaagucaaugagaug

SEQ ID NO: 16111 - RNA, 19 nt, Artificial Sequence
  Synthetic
ugacaaguuugaugagaau

SEQ ID NO: 16112 - RNA, 19 nt, Artificial Sequence
  Synthetic
uguccaaagcugagaagaa

SEQ ID NO: 16113 - RNA, 19 nt, Artificial Sequence
  Synthetic
gagccaagauugucaaaga

SEQ ID NO: 16114 - RNA, 19 nt, Artificial Sequence
  Synthetic
ugaagaaggagcugaacua

SEQ ID NO: 16115 - RNA, 19 nt, Artificial Sequence
  Synthetic
ucaauaauaugcuggacaa

SEQ ID NO: 16116 - RNA, 19 nt, Artificial Sequence
  Synthetic
cugacaaguuugaugagaa

SEQ ID NO: 16117 - RNA, 19 nt, Artificial Sequence
  Synthetic
ccacuuggcauuagcuaaa

SEQ ID NO: 16118 - RNA, 19 nt, Artificial Sequence
  Synthetic
ugucauacuuuguuaggaa

SEQ ID NO: 16119 - RNA, 19 nt, Artificial Sequence
  Synthetic
aagaauggugugaagauua

SEQ ID NO: 16120 - RNA, 19 nt, Artificial Sequence
  Synthetic
gauuauuggugguggaaug

SEQ ID NO: 16121 - RNA, 19 nt, Artificial Sequence
  Synthetic
caucauaggugguggagac

SEQ ID NO: 16122 - RNA, 19 nt, Artificial Sequence
  Synthetic
ggaacaagguuaaagccga

SEQ ID NO: 16123 - RNA, 19 nt, Artificial Sequence
  Synthetic
aauggaacacggaggauaa

SEQ ID NO: 16124 - RNA, 19 nt, Artificial Sequence
  Synthetic
ucaaagaccuaauguccaa

SEQ ID NO: 16125 - RNA, 19 nt, Artificial Sequence
  Synthetic
aagaaagugagcaguguua

SEQ ID NO: 16126 - RNA, 19 nt, Artificial Sequence
  Synthetic
uaacaaacaaccagaggau

SEQ ID NO: 16127 - RNA, 19 nt, Artificial Sequence
  Synthetic
gcuuucauguggaggaaga

SEQ ID NO: 16128 - RNA, 19 nt, Artificial Sequence
  Synthetic
ggagaaagccugugccaac

SEQ ID NO: 16129 - RNA, 19 nt, Artificial Sequence
  Synthetic
cauccugggcggagcuaaa

SEQ ID NO: 16130 - RNA, 19 nt, Artificial Sequence
  Synthetic
aagaacaaccagauaacaa

SEQ ID NO: 16131 - RNA, 19 nt, Artificial Sequence
  Synthetic
gaugggacaauuagauaaa

SEQ ID NO: 16132 - RNA, 19 nt, Artificial Sequence
  Synthetic
agaacaaccagauaacaaa

SEQ ID NO: 16133 - RNA, 19 nt, Artificial Sequence
  Synthetic
gagcugaacuacuuugcaa

SEQ ID NO: 16134 - RNA, 19 nt, Artificial Sequence
  Synthetic
gggacaaguuugacgagaa

SEQ ID NO: 16135 - RNA, 19 nt, Artificial Sequence
  Synthetic
caacaagaaucaugcucaa

SEQ ID NO: 16136 - RNA, 19 nt, Artificial Sequence
  Synthetic
gagccaagaucguuaaaga

SEQ ID NO: 16137 - RNA, 19 nt, Artificial Sequence
  Synthetic
aaagaaugguguaaggauu

SEQ ID NO: 16138 - RNA, 19 nt, Artificial Sequence
  Synthetic
aagaaugguguaaggauua

SEQ ID NO: 16139 - RNA, 19 nt, Artificial Sequence
  Synthetic
acaaacaaccagaggauca

SEQ ID NO: 16140 - RNA, 19 nt, Artificial Sequence
  Synthetic
gcgcagaaguggagaaagc

SEQ ID NO: 16141 - RNA, 19 nt, Artificial Sequence
  Synthetic
ugaagaaggaacuagauua

SEQ ID NO: 16142 - RNA, 19 nt, Artificial Sequence
  Synthetic
gaaagaagauuaaagcuga

SEQ ID NO: 16143 - RNA, 19 nt, Artificial Sequence
  Synthetic
auggaacacugaagauaaa

SEQ ID NO: 16144 - RNA, 19 nt, Artificial Sequence
  Synthetic
aagaagaaccagauuacaa

SEQ ID NO: 16145 - RNA, 19 nt, Artificial Sequence
  Synthetic
gccaagaucguuaaagaua

SEQ ID NO: 16146 - RNA, 19 nt, Artificial Sequence
  Synthetic
ccaagaucguuaaagauau

SEQ ID NO: 16147 - RNA, 19 nt, Artificial Sequence
  Synthetic
agauuaaagcugagccaga

SEQ ID NO: 16148 - RNA, 19 nt, Artificial Sequence
  Synthetic
caguaguucuuaugaguca

SEQ ID NO: 16149 - RNA, 19 nt, Artificial Sequence
  Synthetic
aggaagaagggaagggcca

SEQ ID NO: 16150 - RNA, 19 nt, Artificial Sequence
  Synthetic
ccaaaguggcagacaagau

SEQ ID NO: 16151 - RNA, 19 nt, Artificial Sequence
  Synthetic
uuaaagauaucauggccaa

SEQ ID NO: 16152 - RNA, 19 nt, Artificial Sequence
  Synthetic
gcacaaaagaaugguguaa

SEQ ID NO: 16153 - RNA, 19 nt, Artificial Sequence
  Synthetic
gccaagaucccucuggaaa

SEQ ID NO: 16154 - RNA, 19 nt, Artificial Sequence
  Synthetic
ggacaaguuugacgagaac

SEQ ID NO: 16155 - RNA, 19 nt, Artificial Sequence
  Synthetic
uaucauggccaaagcacaa

SEQ ID NO: 16156 - RNA, 19 nt, Artificial Sequence
  Synthetic
uugcuaaagccuuggaaaa

SEQ ID NO: 16157 - RNA, 19 nt, Artificial Sequence
  Synthetic
augaagaagaaccagauua

SEQ ID NO: 16158 - RNA, 19 nt, Artificial Sequence
  Synthetic
ccucuggaaagaagauuaa

SEQ ID NO: 16159 - RNA, 19 nt, Artificial Sequence
  Synthetic
ggccaaagcacaaaagaau

SEQ ID NO: 16160 - RNA, 19 nt, Artificial Sequence
  Synthetic
agauaaagcagguggaauu

SEQ ID NO: 16161 - RNA, 19 nt, Artificial Sequence
  Synthetic
gggaugaggauaaggcaaa

SEQ ID NO: 16162 - RNA, 19 nt, Artificial Sequence
  Synthetic
uggcaaagugggagaaauu

SEQ ID NO: 16163 - RNA, 19 nt, Artificial Sequence
  Synthetic
agucagaguacuaaggaua

SEQ ID NO: 16164 - RNA, 19 nt, Artificial Sequence
  Synthetic
gcaaacaaccugcgacuua

SEQ ID NO: 16165 - RNA, 19 nt, Artificial Sequence
  Synthetic
cagaagaaaucaagaccau

SEQ ID NO: 16166 - RNA, 19 nt, Artificial Sequence
  Synthetic
cauugaagcugcauauaaa

SEQ ID NO: 16167 - RNA, 19 nt, Artificial Sequence
  Synthetic
acaagaugauaguggaaau

SEQ ID NO: 16168 - RNA, 19 nt, Artificial Sequence
  Synthetic
cagaaaguauggaaaguuu

SEQ ID NO: 16169 - RNA, 19 nt, Artificial Sequence
  Synthetic
gcuugauggcagagggauu

SEQ ID NO: 16170 - RNA, 19 nt, Artificial Sequence
  Synthetic
gugacaaucuuaugaguau

SEQ ID NO: 16171 - RNA, 19 nt, Artificial Sequence
  Synthetic
gcaacuggaugaaugauua

SEQ ID NO: 16172 - RNA, 19 nt, Artificial Sequence
  Synthetic
ggaucuguuuggugugaaa

SEQ ID NO: 16173 - RNA, 19 nt, Artificial Sequence
  Synthetic
guuccaagcugcugugcaa

SEQ ID NO: 16174 - RNA, 19 nt, Artificial Sequence
  Synthetic
ccacagagggccugaugaa

SEQ ID NO: 16175 - RNA, 19 nt, Artificial Sequence
  Synthetic
gaauuuacguggagaccau

SEQ ID NO: 16176 - RNA, 19 nt, Artificial Sequence
  Synthetic
ccucaagcuuacaggaaca

SEQ ID NO: 16177 - RNA, 19 nt, Artificial Sequence
  Synthetic
ugaucagacagguggauaa

SEQ ID NO: 16178 - RNA, 19 nt, Artificial Sequence
  Synthetic
caacaagaugauaguggaa

SEQ ID NO: 16179 - RNA, 19 nt, Artificial Sequence
  Synthetic
agauagucgucaaggucaa

SEQ ID NO: 16180 - RNA, 19 nt, Artificial Sequence
  Synthetic
ucuacgagauggauauaaa

SEQ ID NO: 16181 - RNA, 19 nt, Artificial Sequence
  Synthetic
gugaugaaguugcucguua

SEQ ID NO: 16182 - RNA, 19 nt, Artificial Sequence
  Synthetic
gagauaauguguacagcau

SEQ ID NO: 16183 - RNA, 19 nt, Artificial Sequence
  Synthetic
agaccauugcugagguaua

SEQ ID NO: 16184 - RNA, 19 nt, Artificial Sequence
  Synthetic
gugaagauuaugaugacaa

SEQ ID NO: 16185 - RNA, 19 nt, Artificial Sequence
  Synthetic
cacaggaaauaaugguaua

SEQ ID NO: 16186 - RNA, 19 nt, Artificial Sequence
  Synthetic
agguaaauugucagaguuu

SEQ ID NO: 16187 - RNA, 19 nt, Artificial Sequence
  Synthetic
ccuccagaaccucgagaaa

SEQ ID NO: 16188 - RNA, 19 nt, Artificial Sequence
  Synthetic
ccuggaagcauuagaugaa

SEQ ID NO: 16189 - RNA, 19 nt, Artificial Sequence
  Synthetic
ggagcaaguguuaauaaua

SEQ ID NO: 16190 - RNA, 19 nt, Artificial Sequence
  Synthetic
gcagagaguuacagaaaua

SEQ ID NO: 16191 - RNA, 19 nt, Artificial Sequence
  Synthetic
uguuaaagccacagagaua

SEQ ID NO: 16192 - RNA, 19 nt, Artificial Sequence
  Synthetic
gggugaacguccagaguau

SEQ ID NO: 16193 - RNA, 19 nt, Artificial Sequence
  Synthetic
cauagaagcugcauauaaa

SEQ ID NO: 16194 - RNA, 19 nt, Artificial Sequence
  Synthetic
ccauauucuaagugggaaa

SEQ ID NO: 16195 - RNA, 19 nt, Artificial Sequence
  Synthetic
cauauaaagucgcugauua

SEQ ID NO: 16196 - RNA, 19 nt, Artificial Sequence
  Synthetic
cuaacaagguagaugaaga

SEQ ID NO: 16197 - RNA, 19 nt, Artificial Sequence
  Synthetic
gggauaacaucuacaguau

SEQ ID NO: 16198 - RNA, 19 nt, Artificial Sequence
  Synthetic
ccuacgagcuggagcagaa

SEQ ID NO: 16199 - RNA, 19 nt, Artificial Sequence
  Synthetic
gcgucgacaucuaaagaaa

SEQ ID NO: 16200 - RNA, 19 nt, Artificial Sequence
  Synthetic
cgcaggagauugugguuua

SEQ ID NO: 16201 - RNA, 19 nt, Artificial Sequence
  Synthetic
gaaaugaaacagaugacua

SEQ ID NO: 16202 - RNA, 19 nt, Artificial Sequence
  Synthetic
ggaagaaaguggagguccu

SEQ ID NO: 16203 - RNA, 19 nt, Artificial Sequence
  Synthetic
uggccaaaguggagaaguu

SEQ ID NO: 16204 - RNA, 19 nt, Artificial Sequence
  Synthetic
auucagauuugguaggaua

SEQ ID NO: 16205 - RNA, 19 nt, Artificial Sequence
  Synthetic
cgacuaaggcugugagugu

SEQ ID NO: 16206 - RNA, 19 nt, Artificial Sequence
  Synthetic
gcaccaaacucuucaccaa

SEQ ID NO: 16207 - RNA, 19 nt, Artificial Sequence
  Synthetic
ccacaucguucuacacaua

SEQ ID NO: 16208 - RNA, 19 nt, Artificial Sequence
  Synthetic
gcgaugaggacaaggccaa

SEQ ID NO: 16209 - RNA, 19 nt, Artificial Sequence
  Synthetic
ggagaaagaccaagccaca

SEQ ID NO: 16210 - RNA, 19 nt, Artificial Sequence
  Synthetic
aagacgaacuugaccauua

SEQ ID NO: 16211 - RNA, 19 nt, Artificial Sequence
  Synthetic
agucaaaccugauguugua

SEQ ID NO: 16212 - RNA, 19 nt, Artificial Sequence
  Synthetic
agaaauugaugcuggacuu

SEQ ID NO: 16213 - RNA, 19 nt, Artificial Sequence
  Synthetic
ucaagaaagccaagacgaa

SEQ ID NO: 16214 - RNA, 19 nt, Artificial Sequence
  Synthetic
acauagaagcugcauauaa

SEQ ID NO: 16215 - RNA, 19 nt, Artificial Sequence
  Synthetic
ccuucgagaugguuauaaa

SEQ ID NO: 16216 - RNA, 19 nt, Artificial Sequence
  Synthetic
agguagaugaagaguacaa

SEQ ID NO: 16217 - RNA, 19 nt, Artificial Sequence
  Synthetic
uggcaaaagcaaaggguuu

SEQ ID NO: 16218 - RNA, 19 nt, Artificial Sequence
  Synthetic
gaugagaaguuguuugaca

SEQ ID NO: 16219 - RNA, 19 nt, Artificial Sequence
  Synthetic
ccaaaguggagaaguucaa

SEQ ID NO: 16220 - RNA, 19 nt, Artificial Sequence
  Synthetic
gggauaaguuggaccauua

SEQ ID NO: 16221 - RNA, 19 nt, Artificial Sequence
  Synthetic
ugacaaaggcggugaugaa

SEQ ID NO: 16222 - RNA, 19 nt, Artificial Sequence
  Synthetic
gcuagaauuucaagacaaa

SEQ ID NO: 16223 - RNA, 19 nt, Artificial Sequence
  Synthetic
ccauuguacuggaaagaaa

SEQ ID NO: 16224 - RNA, 19 nt, Artificial Sequence
  Synthetic
cuaagcaaguacaggaaua

SEQ ID NO: 16225 - RNA, 19 nt, Artificial Sequence
  Synthetic
ggaaagaggaagcaaauau

SEQ ID NO: 16226 - RNA, 19 nt, Artificial Sequence
  Synthetic
caaaguagaucuagacaga

SEQ ID NO: 16227 - RNA, 19 nt, Artificial Sequence
  Synthetic
aaggagaagucaagccaaa

SEQ ID NO: 16228 - RNA, 19 nt, Artificial Sequence
  Synthetic
acagaucguuguagaguua

SEQ ID NO: 16229 - RNA, 19 nt, Artificial Sequence
  Synthetic
caaccaacccugucagaua

SEQ ID NO: 16230 - RNA, 19 nt, Artificial Sequence
  Synthetic
uugaagacacguugggaaa

SEQ ID NO: 16231 - RNA, 19 nt, Artificial Sequence
  Synthetic
cagcugacuuuguagaaua

SEQ ID NO: 16232 - RNA, 19 nt, Artificial Sequence
  Synthetic
ccucaggacuccagauuau

SEQ ID NO: 16233 - RNA, 19 nt, Artificial Sequence
  Synthetic
agagauggguauagaacau

SEQ ID NO: 16234 - RNA, 19 nt, Artificial Sequence
  Synthetic
ggacugaauucuuaccaua

SEQ ID NO: 16235 - RNA, 19 nt, Artificial Sequence
  Synthetic
ccgauaagguccagcaguu

SEQ ID NO: 16236 - RNA, 19 nt, Artificial Sequence
  Synthetic
caucaaagauuuaucgcau

SEQ ID NO: 16237 - RNA, 19 nt, Artificial Sequence
  Synthetic
aaugaaacucucugggaua

SEQ ID NO: 16238 - RNA, 19 nt, Artificial Sequence
  Synthetic
aauaauuggaggagucaaa

SEQ ID NO: 16239 - RNA, 19 nt, Artificial Sequence
  Synthetic
agucaaaguucauguggau

SEQ ID NO: 16240 - RNA, 19 nt, Artificial Sequence
  Synthetic
gaagacacguugggaaaua

SEQ ID NO: 16241 - RNA, 19 nt, Artificial Sequence
  Synthetic
caacauugcugcuguauca

SEQ ID NO: 16242 - RNA, 19 nt, Artificial Sequence
  Synthetic
gaaagaggaagcaaauaua

SEQ ID NO: 16243 - RNA, 19 nt, Artificial Sequence
  Synthetic
gaagacaauauaagaggua

SEQ ID NO: 16244 - RNA, 19 nt, Artificial Sequence
  Synthetic
guacaugggaaacagguaa

SEQ ID NO: 16245 - RNA, 19 nt, Artificial Sequence
  Synthetic
ggaaagaaaccccgagcua

SEQ ID NO: 16246 - RNA, 19 nt, Artificial Sequence
  Synthetic
cggcuaaaggaaauugaaa

SEQ ID NO: 16247 - RNA, 19 nt, Artificial Sequence
  Synthetic
aguagaacccauucagaua

SEQ ID NO: 16248 - RNA, 19 nt, Artificial Sequence
  Synthetic
cuacaagccagcugaaauu

SEQ ID NO: 16249 - RNA, 19 nt, Artificial Sequence
  Synthetic
cacuaaaggaucaacguaa

SEQ ID NO: 16250 - RNA, 19 nt, Artificial Sequence
  Synthetic
cggaagaggccuuggcaca

SEQ ID NO: 16251 - RNA, 19 nt, Artificial Sequence
  Synthetic
gagaaggaaaccagaaaga

SEQ ID NO: 16252 - RNA, 19 nt, Artificial Sequence
  Synthetic
gugagaaggaaaccagaaa

SEQ ID NO: 16253 - RNA, 19 nt, Artificial Sequence
  Synthetic
gcacaggacuucuaugaga

SEQ ID NO: 16254 - RNA, 19 nt, Artificial Sequence
  Synthetic
ccaaagagauccugggcag

SEQ ID NO: 16255 - RNA, 19 nt, Artificial Sequence
  Synthetic
ccauggaaauacaagucaa

SEQ ID NO: 16256 - RNA, 19 nt, Artificial Sequence
  Synthetic
gcucacagacuuuggcuuu

SEQ ID NO: 16257 - RNA, 19 nt, Artificial Sequence
  Synthetic
ggaaagagguggacaugug

SEQ ID NO: 16258 - RNA, 19 nt, Artificial Sequence
  Synthetic
cauggaaauacaagucaaa

SEQ ID NO: 16259 - RNA, 19 nt, Artificial Sequence
  Synthetic
caucaagcucacagacuuu

SEQ ID NO: 16260 - RNA, 19 nt, Artificial Sequence
  Synthetic
gaaggaaaccagaaagauc

SEQ ID NO: 16261 - RNA, 19 nt, Artificial Sequence
  Synthetic
gggaagccauggaaauaca

SEQ ID NO: 16262 - RNA, 19 nt, Artificial Sequence
  Synthetic
ccaacaucauacagcugaa

SEQ ID NO: 16263 - RNA, 19 nt, Artificial Sequence
  Synthetic
aauuaugagcccaaagaga

SEQ ID NO: 16264 - RNA, 19 nt, Artificial Sequence
  Synthetic
agguggacauccugcgcaa

SEQ ID NO: 16265 - RNA, 19 nt, Artificial Sequence
  Synthetic
acgggaaagagguggacau

SEQ ID NO: 16266 - RNA, 19 nt, Artificial Sequence
  Synthetic
cgcugaaggagguggacau

SEQ ID NO: 16267 - RNA, 19 nt, Artificial Sequence
  Synthetic
gcuccaugaaugaggacca

SEQ ID NO: 16268 - RNA, 19 nt, Artificial Sequence
  Synthetic
gggagaucgucauccgaga

SEQ ID NO: 16269 - RNA, 19 nt, Artificial Sequence
  Synthetic
accugaagcccgagaacau

SEQ ID NO: 16270 - RNA, 19 nt, Artificial Sequence
  Synthetic
augcugaugcugaggauga

SEQ ID NO: 16271 - RNA, 19 nt, Artificial Sequence
  Synthetic
aaggaaaccagaaagauca

SEQ ID NO: 16272 - RNA, 19 nt, Artificial Sequence
  Synthetic
guguuugaccugaugaaga

SEQ ID NO: 16273 - RNA, 19 nt, Artificial Sequence
  Synthetic
gagcucugcuggaggugau

SEQ ID NO: 16274 - RNA, 19 nt, Artificial Sequence
  Synthetic
ccagaaagaucaugcgagc

SEQ ID NO: 16275 - RNA, 19 nt, Artificial Sequence
  Synthetic
acaucaagcucacagacuu

SEQ ID NO: 16276 - RNA, 19 nt, Artificial Sequence
  Synthetic
cugaaggacacuuaugaga

SEQ ID NO: 16277 - RNA, 19 nt, Artificial Sequence
  Synthetic
gcacuggcgucaucaugua

SEQ ID NO: 16278 - RNA, 19 nt, Artificial Sequence
  Synthetic
cgcccgagugggaugauua

SEQ ID NO: 16279 - RNA, 19 nt, Artificial Sequence
  Synthetic
augagaauuaugagcccaa

SEQ ID NO: 16280 - RNA, 19 nt, Artificial Sequence
  Synthetic
ccaaagaguuuuaccagaa

SEQ ID NO: 16281 - RNA, 19 nt, Artificial Sequence
  Synthetic
gaagaaggguuuugaucau

SEQ ID NO: 16282 - RNA, 19 nt, Artificial Sequence
  Synthetic
gcagaacucuccagaagaa

SEQ ID NO: 16283 - RNA, 19 nt, Artificial Sequence
  Synthetic
agggagagcuguuugacua

SEQ ID NO: 16284 - RNA, 19 nt, Artificial Sequence
  Synthetic
cggugaagauuauggaagu

SEQ ID NO: 16285 - RNA, 19 nt, Artificial Sequence
  Synthetic
cgagaagcuucgagaguug

SEQ ID NO: 16286 - RNA, 19 nt, Artificial Sequence
  Synthetic
gggagacucugcugcuaua

SEQ ID NO: 16287 - RNA, 19 nt, Artificial Sequence
  Synthetic
cugcuauaacugaggauga

SEQ ID NO: 16288 - RNA, 19 nt, Artificial Sequence
  Synthetic
gugagcgacugcaggcaaa

SEQ ID NO: 16289 - RNA, 19 nt, Artificial Sequence
  Synthetic
gcacugcauaugaaauaaa

SEQ ID NO: 16290 - RNA, 19 nt, Artificial Sequence
  Synthetic
gaguuugcggugaagauua

SEQ ID NO: 16291 - RNA, 19 nt, Artificial Sequence
  Synthetic
aucugaagcccgagaauau

SEQ ID NO: 16292 - RNA, 19 nt, Artificial Sequence
  Synthetic
ccacacggcgagagacaca

SEQ ID NO: 16293 - RNA, 19 nt, Artificial Sequence
  Synthetic
gaagauuauggaagugaca

SEQ ID NO: 16294 - RNA, 19 nt, Artificial Sequence
  Synthetic
uguuugaccugaugcggaa

SEQ ID NO: 16295 - RNA, 19 nt, Artificial Sequence
  Synthetic
gaucagagcugggguggaa

SEQ ID NO: 16296 - RNA, 19 nt, Artificial Sequence
  Synthetic
gccacgaguuugcggugaa

SEQ ID NO: 16297 - RNA, 19 nt, Artificial Sequence
  Synthetic
gaucugaagcccgagaaua

SEQ ID NO: 16298 - RNA, 19 nt, Artificial Sequence
  Synthetic
cuuaaaugcuccauggaug

SEQ ID NO: 16299 - RNA, 19 nt, Artificial Sequence
  Synthetic
agaaaggggagcagcagaa

SEQ ID NO: 16300 - RNA, 19 nt, Artificial Sequence
  Synthetic
cuucgagaguuguguggga

SEQ ID NO: 16301 - RNA, 19 nt, Artificial Sequence
  Synthetic
gggagagcuguuugacuau

SEQ ID NO: 16302 - RNA, 19 nt, Artificial Sequence
  Synthetic
uuaaaugcuccauggauga

SEQ ID NO: 16303 - RNA, 19 nt, Artificial Sequence
  Synthetic
agaaugcacuguugaggga

SEQ ID NO: 16304 - RNA, 19 nt, Artificial Sequence
  Synthetic
aguuugcggugaagauuau

SEQ ID NO: 16305 - RNA, 19 nt, Artificial Sequence
  Synthetic
gcgagaagcuucgagaguu

SEQ ID NO: 16306 - RNA, 19 nt, Artificial Sequence
  Synthetic
ggaagggagagcuguuuga

SEQ ID NO: 16307 - RNA, 19 nt, Artificial Sequence
  Synthetic
aagcagaacucuccagaag

SEQ ID NO: 16308 - RNA, 19 nt, Artificial Sequence
  Synthetic
cggcagauccugauguuac

SEQ ID NO: 16309 - RNA, 19 nt, Artificial Sequence
  Synthetic
aaggaaaccagguccauca

SEQ ID NO: 16310 - RNA, 19 nt, Artificial Sequence
  Synthetic
gaauauuggcuuaggaaau

SEQ ID NO: 16311 - RNA, 19 nt, Artificial Sequence
  Synthetic
ugacaaaugugguagacua

SEQ ID NO: 16312 - RNA, 19 nt, Artificial Sequence
  Synthetic
gaaaaguacaguugagaua

SEQ ID NO: 16313 - RNA, 19 nt, Artificial Sequence
  Synthetic
ggaaauugaccauaaggaa

SEQ ID NO: 16314 - RNA, 19 nt, Artificial Sequence
  Synthetic
ggucagaucuuaaaccuua

SEQ ID NO: 16315 - RNA, 19 nt, Artificial Sequence
  Synthetic
acagauaccuugugugauu

SEQ ID NO: 16316 - RNA, 19 nt, Artificial Sequence
  Synthetic
guaguaaaugucagaguaa

SEQ ID NO: 16317 - RNA, 19 nt, Artificial Sequence
  Synthetic
gcagauaaccauaaaguca

SEQ ID NO: 16318 - RNA, 19 nt, Artificial Sequence
  Synthetic
ccaaaucagaagagccuua

SEQ ID NO: 16319 - RNA, 19 nt, Artificial Sequence
  Synthetic
cagaagagccuuaugguca

SEQ ID NO: 16320 - RNA, 19 nt, Artificial Sequence
  Synthetic
ccugaugaauggagagcau

SEQ ID NO: 16321 - RNA, 19 nt, Artificial Sequence
  Synthetic
gaaauugaccauaaggaau

SEQ ID NO: 16322 - RNA, 19 nt, Artificial Sequence
  Synthetic
uggauuacaucaucagaaa

SEQ ID NO: 16323 - RNA, 19 nt, Artificial Sequence
  Synthetic
ucucaagguucaaguggaa

SEQ ID NO: 16324 - RNA, 19 nt, Artificial Sequence
  Synthetic
ggaaauacguugcagugau

SEQ ID NO: 16325 - RNA, 19 nt, Artificial Sequence
  Synthetic
agaagaauguucaugcuaa

SEQ ID NO: 16326 - RNA, 19 nt, Artificial Sequence
  Synthetic
gaagaauguucaugcuaau

SEQ ID NO: 16327 - RNA, 19 nt, Artificial Sequence
  Synthetic
gcagaaaugugaaaaggaa

SEQ ID NO: 16328 - RNA, 19 nt, Artificial Sequence
  Synthetic
ggauugaugaugaagaauu

SEQ ID NO: 16329 - RNA, 19 nt, Artificial Sequence
  Synthetic
ggucauacguucuucaaaa

SEQ ID NO: 16330 - RNA, 19 nt, Artificial Sequence
  Synthetic
gguaguaaaugucagagua

SEQ ID NO: 16331 - RNA, 19 nt, Artificial Sequence
  Synthetic
gaacuuugugcaagauuua

SEQ ID NO: 16332 - RNA, 19 nt, Artificial Sequence
  Synthetic
guuacaaggaggcugaaua

SEQ ID NO: 16333 - RNA, 19 nt, Artificial Sequence
  Synthetic
agcaauagaaguuggaauu

SEQ ID NO: 16334 - RNA, 19 nt, Artificial Sequence
  Synthetic
ugacaugaacuuugugcaa

SEQ ID NO: 16335 - RNA, 19 nt, Artificial Sequence
  Synthetic
agaagagccuuauggucaa

SEQ ID NO: 16336 - RNA, 19 nt, Artificial Sequence
  Synthetic
aagcaauagaaguuggaau

SEQ ID NO: 16337 - RNA, 19 nt, Artificial Sequence
  Synthetic
acaugaacuuugugcaaga

SEQ ID NO: 16338 - RNA, 19 nt, Artificial Sequence
  Synthetic
ugagggaguucauuggaaa

SEQ ID NO: 16339 - RNA, 19 nt, Artificial Sequence
  Synthetic
gggaagaagugcuauaucu

SEQ ID NO: 16340 - RNA, 19 nt, Artificial Sequence
  Synthetic
cuacaaagaugcagacuau

SEQ ID NO: 16341 - RNA, 19 nt, Artificial Sequence
  Synthetic
gguugguggugcuggauua

SEQ ID NO: 16342 - RNA, 19 nt, Artificial Sequence
  Synthetic
gcggcuugcacuagagaaa

SEQ ID NO: 16343 - RNA, 19 nt, Artificial Sequence
  Synthetic
guaacuaucuugaagguuu

SEQ ID NO: 16344 - RNA, 19 nt, Artificial Sequence
  Synthetic
gaggaaauauugucagaga

SEQ ID NO: 16345 - RNA, 19 nt, Artificial Sequence
  Synthetic
caacacugaucgaggcaau

SEQ ID NO: 16346 - RNA, 19 nt, Artificial Sequence
  Synthetic
gagccaagguggugucaga

SEQ ID NO: 16347 - RNA, 19 nt, Artificial Sequence
  Synthetic
caacgcaaauguaugaaua

SEQ ID NO: 16348 - RNA, 19 nt, Artificial Sequence
  Synthetic
cagacugggugguggugaa

SEQ ID NO: 16349 - RNA, 19 nt, Artificial Sequence
  Synthetic
gaacuuacacugauaggaa

SEQ ID NO: 16350 - RNA, 19 nt, Artificial Sequence
  Synthetic
acaacuggcugauuaaaua

SEQ ID NO: 16351 - RNA, 19 nt, Artificial Sequence
  Synthetic
ccaagaaugaagagcccua

SEQ ID NO: 16352 - RNA, 19 nt, Artificial Sequence
  Synthetic
ggucaucucaugucagaaa

SEQ ID NO: 16353 - RNA, 19 nt, Artificial Sequence
  Synthetic
gcuacaaagaugcagacua

SEQ ID NO: 16354 - RNA, 19 nt, Artificial Sequence
  Synthetic
ggaccaaguggcugcagaa

SEQ ID NO: 16355 - RNA, 19 nt, Artificial Sequence
  Synthetic
gugcauagcucucuguaga

SEQ ID NO: 16356 - RNA, 19 nt, Artificial Sequence
  Synthetic
gaucauugcugucuucaaa

SEQ ID NO: 16357 - RNA, 19 nt, Artificial Sequence
  Synthetic
ggaagaggaccuauaugaa

SEQ ID NO: 16358 - RNA, 19 nt, Artificial Sequence
  Synthetic
aguucuagcucucgggaca

SEQ ID NO: 16359 - RNA, 19 nt, Artificial Sequence
  Synthetic
ccacgcagccggaguguau

SEQ ID NO: 16360 - RNA, 19 nt, Artificial Sequence
  Synthetic
agugagaccuucaacuaua

SEQ ID NO: 16361 - RNA, 19 nt, Artificial Sequence
  Synthetic
gcagaggcaggaagagcua

SEQ ID NO: 16362 - RNA, 19 nt, Artificial Sequence
  Synthetic
ggagagaggccuucaaacu

SEQ ID NO: 16363 - RNA, 19 nt, Artificial Sequence
  Synthetic
ugaaggagccuguuaucaa

SEQ ID NO: 16364 - RNA, 19 nt, Artificial Sequence
  Synthetic
cagaggaaauauugucaga

SEQ ID NO: 16365 - RNA, 19 nt, Artificial Sequence
  Synthetic
cgaaacaguucuccuggaa

SEQ ID NO: 16366 - RNA, 19 nt, Artificial Sequence
  Synthetic
gaauguggacucuggaaga

SEQ ID NO: 16367 - RNA, 19 nt, Artificial Sequence
  Synthetic
ggagaagcacaaucaggaa

SEQ ID NO: 16368 - RNA, 19 nt, Artificial Sequence
  Synthetic
aaugacaacuggcugauua

SEQ ID NO: 16369 - RNA, 19 nt, Artificial Sequence
  Synthetic
ccuauuauauucugcauca

SEQ ID NO: 16370 - RNA, 19 nt, Artificial Sequence
  Synthetic
ugagaaagcugaagggaua

SEQ ID NO: 16371 - RNA, 19 nt, Artificial Sequence
  Synthetic
ggacaaagaagaagcauua

SEQ ID NO: 16372 - RNA, 19 nt, Artificial Sequence
  Synthetic
aaagaaaggugaauggaaa

SEQ ID NO: 16373 - RNA, 19 nt, Artificial Sequence
  Synthetic
aggaagugcugcagaauaa

SEQ ID NO: 16374 - RNA, 19 nt, Artificial Sequence
  Synthetic
gaagagagaucgacagcaa

SEQ ID NO: 16375 - RNA, 19 nt, Artificial Sequence
  Synthetic
gaugauuccuucaggguua

SEQ ID NO: 16376 - RNA, 19 nt, Artificial Sequence
  Synthetic
gagcaaaagauguggacaa

SEQ ID NO: 16377 - RNA, 19 nt, Artificial Sequence
  Synthetic
gguauuagaccaugaggaa

SEQ ID NO: 16378 - RNA, 19 nt, Artificial Sequence
  Synthetic
cuuagaaacacuagagaau

SEQ ID NO: 16379 - RNA, 19 nt, Artificial Sequence
  Synthetic
gcucagauauuuagcaaca

SEQ ID NO: 16380 - RNA, 19 nt, Artificial Sequence
  Synthetic
ccuacaacuugauaagaaa

SEQ ID NO: 16381 - RNA, 19 nt, Artificial Sequence
  Synthetic
gcaaagaaacccuaagaca

SEQ ID NO: 16382 - RNA, 19 nt, Artificial Sequence
  Synthetic
cauuagugaugaugagcua

SEQ ID NO: 16383 - RNA, 19 nt, Artificial Sequence
  Synthetic
ugauaagaaagcagacaaa

SEQ ID NO: 16384 - RNA, 19 nt, Artificial Sequence
  Synthetic
gaccagaagcuuugggcaa

SEQ ID NO: 16385 - RNA, 19 nt, Artificial Sequence
  Synthetic
gcagaguggcuaaggaaau

SEQ ID NO: 16386 - RNA, 19 nt, Artificial Sequence
  Synthetic
uggauaauguggagguauu

SEQ ID NO: 16387 - RNA, 19 nt, Artificial Sequence
  Synthetic
gaauagugcuacagguuga

SEQ ID NO: 16388 - RNA, 19 nt, Artificial Sequence
  Synthetic
uagaaacacuagagaauga

SEQ ID NO: 16389 - RNA, 19 nt, Artificial Sequence
  Synthetic
cuccaaagucugaggauau

SEQ ID NO: 16390 - RNA, 19 nt, Artificial Sequence
  Synthetic
guuuaagguuggugaagau

SEQ ID NO: 16391 - RNA, 19 nt, Artificial Sequence
  Synthetic
caaaguagcaagaguguca

SEQ ID NO: 16392 - RNA, 19 nt, Artificial Sequence
  Synthetic
gaaagaaaggugaauggaa

SEQ ID NO: 16393 - RNA, 19 nt, Artificial Sequence
  Synthetic
gaaauacaacccagauaaa

SEQ ID NO: 16394 - RNA, 19 nt, Artificial Sequence
  Synthetic
gcaacauaacuuagaaaca

SEQ ID NO: 16395 - RNA, 19 nt, Artificial Sequence
  Synthetic
ccauugacauugaaggauu

SEQ ID NO: 16396 - RNA, 19 nt, Artificial Sequence
  Synthetic
ucuaaaaguuuguggucaa

SEQ ID NO: 16397 - RNA, 19 nt, Artificial Sequence
  Synthetic
agggaaacuucuugauauu

SEQ ID NO: 16398 - RNA, 19 nt, Artificial Sequence
  Synthetic
uguccagggcauugggaaa

SEQ ID NO: 16399 - RNA, 19 nt, Artificial Sequence
  Synthetic
aaacauaugcggagaaaau

SEQ ID NO: 16400 - RNA, 19 nt, Artificial Sequence
  Synthetic
gggaggagcuaaacgguua

SEQ ID NO: 16401 - RNA, 19 nt, Artificial Sequence
  Synthetic
gggaagaagaccagcgcaa

SEQ ID NO: 16402 - RNA, 19 nt, Artificial Sequence
  Synthetic
acaaugagauguugguaua

SEQ ID NO: 16403 - RNA, 19 nt, Artificial Sequence
  Synthetic
ggguagacuuuuacagcaa

SEQ ID NO: 16404 - RNA, 19 nt, Artificial Sequence
  Synthetic
ugguaaaggugaugcgaga

SEQ ID NO: 16405 - RNA, 19 nt, Artificial Sequence
  Synthetic
gcaaagacaccucuggaaa

SEQ ID NO: 16406 - RNA, 19 nt, Artificial Sequence
  Synthetic
ccuauaugcuccugauuua

SEQ ID NO: 16407 - RNA, 19 nt, Artificial Sequence
  Synthetic
gagcagggauucugggaga

SEQ ID NO: 16408 - RNA, 19 nt, Artificial Sequence
  Synthetic
cagcaaaccguaaguuaua

SEQ ID NO: 16409 - RNA, 19 nt, Artificial Sequence
  Synthetic
ccaacaaaggcuauauaua

SEQ ID NO: 16410 - RNA, 19 nt, Artificial Sequence
  Synthetic
gcagcaaaguuuuaaguuu

SEQ ID NO: 16411 - RNA, 19 nt, Artificial Sequence
  Synthetic
ggauuggaguggugauuau

SEQ ID NO: 16412 - RNA, 19 nt, Artificial Sequence
  Synthetic
guauagagaaggaagaaga

SEQ ID NO: 16413 - RNA, 19 nt, Artificial Sequence
  Synthetic
augagaaggcuguggagaa

SEQ ID NO: 16414 - RNA, 19 nt, Artificial Sequence
  Synthetic
ccacguacgucuugggcau

SEQ ID NO: 16415 - RNA, 19 nt, Artificial Sequence
  Synthetic
ggaauguggacguggguga

SEQ ID NO: 16416 - RNA, 19 nt, Artificial Sequence
  Synthetic
gcagagggaugguggagau

SEQ ID NO: 16417 - RNA, 19 nt, Artificial Sequence
  Synthetic
gugucugacuugagaguga

SEQ ID NO: 16418 - RNA, 19 nt, Artificial Sequence
  Synthetic
cagacuggcugcagaaaca

SEQ ID NO: 16419 - RNA, 19 nt, Artificial Sequence
  Synthetic
uuaaagacaucaugcagaa

SEQ ID NO: 16420 - RNA, 19 nt, Artificial Sequence
  Synthetic
ccagaugaacggaccauaa

SEQ ID NO: 16421 - RNA, 19 nt, Artificial Sequence
  Synthetic
gcucugacauccaagacua

SEQ ID NO: 16422 - RNA, 19 nt, Artificial Sequence
  Synthetic
ccgcaaagaacuagcgaug

SEQ ID NO: 16423 - RNA, 19 nt, Artificial Sequence
  Synthetic
cagcuggucucuaugaaua

SEQ ID NO: 16424 - RNA, 19 nt, Artificial Sequence
  Synthetic
gccggaagcuucuggguuu

SEQ ID NO: 16425 - RNA, 19 nt, Artificial Sequence
  Synthetic
gagaagaguuuaaccgcca

SEQ ID NO: 16426 - RNA, 19 nt, Artificial Sequence
  Synthetic
gagagaaggucguggaagc

SEQ ID NO: 16427 - RNA, 19 nt, Artificial Sequence
  Synthetic
guaaaggugaugcgagaga

SEQ ID NO: 16428 - RNA, 19 nt, Artificial Sequence
  Synthetic
caagagaggaagacuauuu

SEQ ID NO: 16429 - RNA, 19 nt, Artificial Sequence
  Synthetic
gagggaugguggagaugau

SEQ ID NO: 16430 - RNA, 19 nt, Artificial Sequence
  Synthetic
gggaagaucuggagcacua

SEQ ID NO: 16431 - RNA, 19 nt, Artificial Sequence
  Synthetic
gaaacaagccugacagaaa

SEQ ID NO: 16432 - RNA, 19 nt, Artificial Sequence
  Synthetic
gcagaagaauauagaguca

SEQ ID NO: 16433 - RNA, 19 nt, Artificial Sequence
  Synthetic
acaacuaggucgauugaaa

SEQ ID NO: 16434 - RNA, 19 nt, Artificial Sequence
  Synthetic
gaaagaaauuggcagacua

SEQ ID NO: 16435 - RNA, 19 nt, Artificial Sequence
  Synthetic
augaugaacuacuggaaua

SEQ ID NO: 16436 - RNA, 19 nt, Artificial Sequence
  Synthetic
gcaaaaggcuugauagaga

SEQ ID NO: 16437 - RNA, 19 nt, Artificial Sequence
  Synthetic
aggaaagucuggaguguuu

SEQ ID NO: 16438 - RNA, 19 nt, Artificial Sequence
  Synthetic
caggaaagcuaucucgaaa

SEQ ID NO: 16439 - RNA, 19 nt, Artificial Sequence
  Synthetic
guacauggcagaagaauau

SEQ ID NO: 16440 - RNA, 19 nt, Artificial Sequence
  Synthetic
gagaagaaguuuccagaca

SEQ ID NO: 16441 - RNA, 19 nt, Artificial Sequence
  Synthetic
ggacaugucuuaaugcuua

SEQ ID NO: 16442 - RNA, 19 nt, Artificial Sequence
  Synthetic
ucacagagcuccaaggaca

SEQ ID NO: 16443 - RNA, 19 nt, Artificial Sequence
  Synthetic
ccauauaggauuugaaagu

SEQ ID NO: 16444 - RNA, 19 nt, Artificial Sequence
  Synthetic
gcaugaaauuugaugugua

SEQ ID NO: 16445 - RNA, 19 nt, Artificial Sequence
  Synthetic
uagcaaagcaccagcaauu

SEQ ID NO: 16446 - RNA, 19 nt, Artificial Sequence
  Synthetic
gaagaaagaaauuggcaga

SEQ ID NO: 16447 - RNA, 19 nt, Artificial Sequence
  Synthetic
gcacacaacauuccagaaa

SEQ ID NO: 16448 - RNA, 19 nt, Artificial Sequence
  Synthetic
ugccgaaagaagagaauaa

SEQ ID NO: 16449 - RNA, 19 nt, Artificial Sequence
  Synthetic
ccuaaugaaucacacgaaa

SEQ ID NO: 16450 - RNA, 19 nt, Artificial Sequence
  Synthetic
gaagguaacaacugaacua

SEQ ID NO: 16451 - RNA, 19 nt, Artificial Sequence
  Synthetic
ugaccauacuagugaaaca

SEQ ID NO: 16452 - RNA, 19 nt, Artificial Sequence
  Synthetic
aguacauggcagaagaaua

SEQ ID NO: 16453 - RNA, 19 nt, Artificial Sequence
  Synthetic
ccucuugaaugaugaacua

SEQ ID NO: 16454 - RNA, 19 nt, Artificial Sequence
  Synthetic
gacaggagguacugaagaa

SEQ ID NO: 16455 - RNA, 19 nt, Artificial Sequence
  Synthetic
guaugaacaccaagaauuu

SEQ ID NO: 16456 - RNA, 19 nt, Artificial Sequence
  Synthetic
gaauaaaaggaguggacau

SEQ ID NO: 16457 - RNA, 19 nt, Artificial Sequence
  Synthetic
agaugagaucaguggcaaa

SEQ ID NO: 16458 - RNA, 19 nt, Artificial Sequence
  Synthetic
augcuaaucugaugggcaa

SEQ ID NO: 16459 - RNA, 19 nt, Artificial Sequence
  Synthetic
augaaaaggccuugaggaa

SEQ ID NO: 16460 - RNA, 19 nt, Artificial Sequence
  Synthetic
ccacauagacuuuggauau

SEQ ID NO: 16461 - RNA, 19 nt, Artificial Sequence
  Synthetic
ccuuggaacuucugggaaa

SEQ ID NO: 16462 - RNA, 19 nt, Artificial Sequence
  Synthetic
agaauuuaguugagagcaa

SEQ ID NO: 16463 - RNA, 19 nt, Artificial Sequence
  Synthetic
aagaaaugguagaaggaau

SEQ ID NO: 16464 - RNA, 19 nt, Artificial Sequence
  Synthetic
aggcaaauauccaguuaua

SEQ ID NO: 16465 - RNA, 19 nt, Artificial Sequence
  Synthetic
augaagaggcugugcauua

SEQ ID NO: 16466 - RNA, 19 nt, Artificial Sequence
  Synthetic
gaaccuaccaagaaggaua

SEQ ID NO: 16467 - RNA, 19 nt, Artificial Sequence
  Synthetic
gagauguacuugaacguaa

SEQ ID NO: 16468 - RNA, 19 nt, Artificial Sequence
  Synthetic
cuggauagauugacauuua

SEQ ID NO: 16469 - RNA, 19 nt, Artificial Sequence
  Synthetic
ggacaagcuguuacggaaa

SEQ ID NO: 16470 - RNA, 19 nt, Artificial Sequence
  Synthetic
aaguggaaaucguaagaaa

SEQ ID NO: 16471 - RNA, 19 nt, Artificial Sequence
  Synthetic
caaugaagcugaauaaaga

SEQ ID NO: 16472 - RNA, 19 nt, Artificial Sequence
  Synthetic
gacggaagauggaggcaaa

SEQ ID NO: 16473 - RNA, 19 nt, Artificial Sequence
  Synthetic
ggaagggaagagagaacaa

SEQ ID NO: 16474 - RNA, 19 nt, Artificial Sequence
  Synthetic
caccaaagcucaucgacaa

SEQ ID NO: 16475 - RNA, 19 nt, Artificial Sequence
  Synthetic
gcuuagaccugucggauga

SEQ ID NO: 16476 - RNA, 19 nt, Artificial Sequence
  Synthetic
aagcauuguugaaggguga

SEQ ID NO: 16477 - RNA, 19 nt, Artificial Sequence
  Synthetic
agagagaacaaaagaguua

SEQ ID NO: 16478 - RNA, 19 nt, Artificial Sequence
  Synthetic
ccuugaugguugaugcaaa

SEQ ID NO: 16479 - RNA, 19 nt, Artificial Sequence
  Synthetic
gcacacagagugagcagua

SEQ ID NO: 16480 - RNA, 19 nt, Artificial Sequence
  Synthetic
gcgaaaaucuggaacaaga

SEQ ID NO: 16481 - RNA, 19 nt, Artificial Sequence
  Synthetic
agauggaacuggaaugaau

SEQ ID NO: 16482 - RNA, 19 nt, Artificial Sequence
  Synthetic
gauaaagccuugaccaaaa

SEQ ID NO: 16483 - RNA, 19 nt, Artificial Sequence
  Synthetic
auagauagcucccaaauua

SEQ ID NO: 16484 - RNA, 19 nt, Artificial Sequence
  Synthetic
cuacaaagcauuuaguaca

SEQ ID NO: 16485 - RNA, 19 nt, Artificial Sequence
  Synthetic
gcaacuuacauaugaagaa

SEQ ID NO: 16486 - RNA, 19 nt, Artificial Sequence
  Synthetic
ccacgagagaucaguuaaa

SEQ ID NO: 16487 - RNA, 19 nt, Artificial Sequence
  Synthetic
gauccaaacauuccagaua

SEQ ID NO: 16488 - RNA, 19 nt, Artificial Sequence
  Synthetic
caccaaugaagcugaauaa

SEQ ID NO: 16489 - RNA, 19 nt, Artificial Sequence
  Synthetic
aggcauugcuuggagauaa

SEQ ID NO: 16490 - RNA, 19 nt, Artificial Sequence
  Synthetic
gguuaaagauccugaagua

SEQ ID NO: 16491 - RNA, 19 nt, Artificial Sequence
  Synthetic
gacaaugaauuaagggaaa

SEQ ID NO: 16492 - RNA, 19 nt, Artificial Sequence
  Synthetic
ggauagaggccaaauaaua

SEQ ID NO: 16493 - RNA, 19 nt, Artificial Sequence
  Synthetic
gcauugaacugaaagauaa

SEQ ID NO: 16494 - RNA, 19 nt, Artificial Sequence
  Synthetic
cuuaaagagugucgaauua

SEQ ID NO: 16495 - RNA, 19 nt, Artificial Sequence
  Synthetic
ggugaaagacgauggacaa

SEQ ID NO: 16496 - RNA, 19 nt, Artificial Sequence
  Synthetic
cagacuagcuagagacaau

SEQ ID NO: 16497 - RNA, 19 nt, Artificial Sequence
  Synthetic
ggaaugaauggcugaauua

SEQ ID NO: 16498 - RNA, 19 nt, Artificial Sequence
  Synthetic
ugaagaaagcauugacuaa

SEQ ID NO: 16499 - RNA, 19 nt, Artificial Sequence
  Synthetic
caagagaauuugagagguu

SEQ ID NO: 16500 - RNA, 19 nt, Artificial Sequence
  Synthetic
caagaacaaaggagaaaua

SEQ ID NO: 16501 - RNA, 19 nt, Artificial Sequence
  Synthetic
gcuuagaguuggaguuuga

SEQ ID NO: 16502 - RNA, 19 nt, Artificial Sequence
  Synthetic
gguaauaguuucuccaaau

SEQ ID NO: 16503 - RNA, 19 nt, Artificial Sequence
  Synthetic
gugcaaaggcggcuugaaa

SEQ ID NO: 16504 - RNA, 19 nt, Artificial Sequence
  Synthetic
uuauugagguggugcgaaa

SEQ ID NO: 16505 - RNA, 19 nt, Artificial Sequence
  Synthetic
agacaagaacaaaggagaa

SEQ ID NO: 16506 - RNA, 19 nt, Artificial Sequence
  Synthetic
ccaagaagcagaaagggaa

SEQ ID NO: 16507 - RNA, 19 nt, Artificial Sequence
  Synthetic
gccaguaccucauggauua

SEQ ID NO: 16508 - RNA, 19 nt, Artificial Sequence
  Synthetic
guaaagaagcuguggaucu

SEQ ID NO: 16509 - RNA, 19 nt, Artificial Sequence
  Synthetic
gcuuaaagagugucgaauu

SEQ ID NO: 16510 - RNA, 19 nt, Artificial Sequence
  Synthetic
gacccuagccuuagauaaa

SEQ ID NO: 16511 - RNA, 19 nt, Artificial Sequence
  Synthetic
ugacaaacuuucucaguau

SEQ ID NO: 16512 - RNA, 19 nt, Artificial Sequence
  Synthetic
gaugaauacuuccuagaaa

SEQ ID NO: 16513 - RNA, 19 nt, Artificial Sequence
  Synthetic
uaaagaaacuccaugcuua

SEQ ID NO: 16514 - RNA, 19 nt, Artificial Sequence
  Synthetic
agacaaugaauuaagggaa

SEQ ID NO: 16515 - RNA, 19 nt, Artificial Sequence
  Synthetic
cacaaagacaagagaauuu

SEQ ID NO: 16516 - RNA, 19 nt, Artificial Sequence
  Synthetic
ucgaaagacccuagccuua

SEQ ID NO: 16517 - RNA, 19 nt, Artificial Sequence
  Synthetic
caaauaaugacaagcagaa

SEQ ID NO: 16518 - RNA, 19 nt, Artificial Sequence
  Synthetic
ucacugagcaggagaaaga

SEQ ID NO: 16519 - RNA, 19 nt, Artificial Sequence
  Synthetic
auaacuugcuugugagauu

SEQ ID NO: 16520 - RNA, 19 nt, Artificial Sequence
  Synthetic
ggaauaaacuugaggaugu

SEQ ID NO: 16521 - RNA, 19 nt, Artificial Sequence
  Synthetic
auugagaacuggagacaua

SEQ ID NO: 16522 - RNA, 19 nt, Artificial Sequence
  Synthetic
guacugagcuccuguguaa

SEQ ID NO: 16523 - RNA, 19 nt, Artificial Sequence
  Synthetic
cgacaagacugccgagaga

SEQ ID NO: 16524 - RNA, 19 nt, Artificial Sequence
  Synthetic
ggaaugaaccacuggaauu

SEQ ID NO: 16525 - RNA, 19 nt, Artificial Sequence
  Synthetic
agaaagagcacuugguaau

SEQ ID NO: 16526 - RNA, 19 nt, Artificial Sequence
  Synthetic
ggaccgagccauugaggaa

SEQ ID NO: 16527 - RNA, 19 nt, Artificial Sequence
  Synthetic
agggaagagugaagaagaa

SEQ ID NO: 16528 - RNA, 19 nt, Artificial Sequence
  Synthetic
gcgcaaauucagcgaggaa

SEQ ID NO: 16529 - RNA, 19 nt, Artificial Sequence
  Synthetic
cugaugaacucgaagaaau

SEQ ID NO: 16530 - RNA, 19 nt, Artificial Sequence
  Synthetic
ggaagcaaguucacaauua

SEQ ID NO: 16531 - RNA, 19 nt, Artificial Sequence
  Synthetic
gcucagagguaucagggaa

SEQ ID NO: 16532 - RNA, 19 nt, Artificial Sequence
  Synthetic
agggaaagcuggacuacua

SEQ ID NO: 16533 - RNA, 19 nt, Artificial Sequence
  Synthetic
ccauagaggcugccauaaa

SEQ ID NO: 16534 - RNA, 19 nt, Artificial Sequence
  Synthetic
gaaguuaaacagagccaaa

SEQ ID NO: 16535 - RNA, 19 nt, Artificial Sequence
  Synthetic
acagaugagugaugaagaa

SEQ ID NO: 16536 - RNA, 19 nt, Artificial Sequence
  Synthetic
caucguaagcucagaggua

SEQ ID NO: 16537 - RNA, 19 nt, Artificial Sequence
  Synthetic
gaagaaauguugaauccaa

SEQ ID NO: 16538 - RNA, 19 nt, Artificial Sequence
  Synthetic
ggauucaguuggagugauu

SEQ ID NO: 16539 - RNA, 19 nt, Artificial Sequence
  Synthetic
ugaacuggcuuaaagaaua

SEQ ID NO: 16540 - RNA, 19 nt, Artificial Sequence
  Synthetic
ccuuauggcuguuuagcaa

SEQ ID NO: 16541 - RNA, 19 nt, Artificial Sequence
  Synthetic
gcaaauucagcgaggaaaa

SEQ ID NO: 16542 - RNA, 19 nt, Artificial Sequence
  Synthetic
acgaagaaaucaacgaaaa

SEQ ID NO: 16543 - RNA, 19 nt, Artificial Sequence
  Synthetic
ggguaaauacgaugguuuu

SEQ ID NO: 16544 - RNA, 19 nt, Artificial Sequence
  Synthetic
cugucaaucaaguggaaua

SEQ ID NO: 16545 - RNA, 19 nt, Artificial Sequence
  Synthetic
ccaaagaaaacacgaauua

SEQ ID NO: 16546 - RNA, 19 nt, Artificial Sequence
  Synthetic
cccuagagcuucuggauuu

SEQ ID NO: 16547 - RNA, 19 nt, Artificial Sequence
  Synthetic
cuugaaggauccugaagua

SEQ ID NO: 16548 - RNA, 19 nt, Artificial Sequence
  Synthetic
gaaagaagcugguuuggau

SEQ ID NO: 16549 - RNA, 19 nt, Artificial Sequence
  Synthetic
ccacauugacuuuggacau

SEQ ID NO: 16550 - RNA, 19 nt, Artificial Sequence
  Synthetic
ggaccaaggaggagaauca

SEQ ID NO: 16551 - RNA, 19 nt, Artificial Sequence
  Synthetic
ggaacaagcaugaggaugu

SEQ ID NO: 16552 - RNA, 19 nt, Artificial Sequence
  Synthetic
uugaaauggugcaggcuua

SEQ ID NO: 16553 - RNA, 19 nt, Artificial Sequence
  Synthetic
gcaacgagaugcugugcaa

SEQ ID NO: 16554 - RNA, 19 nt, Artificial Sequence
  Synthetic
ccagaaaccgcgugccaaa

SEQ ID NO: 16555 - RNA, 19 nt, Artificial Sequence
  Synthetic
ggaugaagcugguggugca

SEQ ID NO: 16556 - RNA, 19 nt, Artificial Sequence
  Synthetic
gaaagcagguuuuaacaaa

SEQ ID NO: 16557 - RNA, 19 nt, Artificial Sequence
  Synthetic
acaugaaggugcugaugaa

SEQ ID NO: 16558 - RNA, 19 nt, Artificial Sequence
  Synthetic
agaaggaccugguguggaa

SEQ ID NO: 16559 - RNA, 19 nt, Artificial Sequence
  Synthetic
agcaagagcuggaggacga

SEQ ID NO: 16560 - RNA, 19 nt, Artificial Sequence
  Synthetic
ggucacgcaugaaggcaaa

SEQ ID NO: 16561 - RNA, 19 nt, Artificial Sequence
  Synthetic
gggcuggaccugaggauga

SEQ ID NO: 16562 - RNA, 19 nt, Artificial Sequence
  Synthetic
ucucaaaggucuuccaaaa

SEQ ID NO: 16563 - RNA, 19 nt, Artificial Sequence
  Synthetic
gcaaguuaguuaaguauca

SEQ ID NO: 16564 - RNA, 19 nt, Artificial Sequence
  Synthetic
ccaaggagcugaugcacuu

SEQ ID NO: 16565 - RNA, 19 nt, Artificial Sequence
  Synthetic
caucaugauccgagagagu

SEQ ID NO: 16566 - RNA, 19 nt, Artificial Sequence
  Synthetic
gugagaaauuugaacgguu

SEQ ID NO: 16567 - RNA, 19 nt, Artificial Sequence
  Synthetic
acuacaaggaccagcuuaa

SEQ ID NO: 16568 - RNA, 19 nt, Artificial Sequence
  Synthetic
gggaaggcaaguuaguuaa

SEQ ID NO: 16569 - RNA, 19 nt, Artificial Sequence
  Synthetic
ggccagaacucuuccagaa

SEQ ID NO: 16570 - RNA, 19 nt, Artificial Sequence
  Synthetic
ccaaagacauccaguaucu

SEQ ID NO: 16571 - RNA, 19 nt, Artificial Sequence
  Synthetic
ccaucaagucgcugcggaa

SEQ ID NO: 16572 - RNA, 19 nt, Artificial Sequence
  Synthetic
aaacagaggaggaggcacu

SEQ ID NO: 16573 - RNA, 19 nt, Artificial Sequence
  Synthetic
gcaaaggccuccacgaguu

SEQ ID NO: 16574 - RNA, 19 nt, Artificial Sequence
  Synthetic
ggaaacugacggacgauga

SEQ ID NO: 16575 - RNA, 19 nt, Artificial Sequence
  Synthetic
augaguaccuguauggcaa

SEQ ID NO: 16576 - RNA, 19 nt, Artificial Sequence
  Synthetic
ccaccaagaagaaguccaa

SEQ ID NO: 16577 - RNA, 19 nt, Artificial Sequence
  Synthetic
ccacagcguuucugguuuu

SEQ ID NO: 16578 - RNA, 19 nt, Artificial Sequence
  Synthetic
aaacagccauaaacggaaa

SEQ ID NO: 16579 - RNA, 19 nt, Artificial Sequence
  Synthetic
ggagcuaaacagccauaaa

SEQ ID NO: 16580 - RNA, 19 nt, Artificial Sequence
  Synthetic
caucaaacaaggagagaaa

SEQ ID NO: 16581 - RNA, 19 nt, Artificial Sequence
  Synthetic
gcauggagcuggagaacua

SEQ ID NO: 16582 - RNA, 19 nt, Artificial Sequence
  Synthetic
gcaaagaagacauugaaua

SEQ ID NO: 16583 - RNA, 19 nt, Artificial Sequence
  Synthetic
gggcauuaauaaagagaga

SEQ ID NO: 16584 - RNA, 19 nt, Artificial Sequence
  Synthetic
ggaagaagauugccaacaa

SEQ ID NO: 16585 - RNA, 19 nt, Artificial Sequence
  Synthetic
ggucaagaucagaggcauu

SEQ ID NO: 16586 - RNA, 19 nt, Artificial Sequence
  Synthetic
aggcagcaguggagagauu

SEQ ID NO: 16587 - RNA, 19 nt, Artificial Sequence
  Synthetic
gagaaaagauguuggcauu

SEQ ID NO: 16588 - RNA, 19 nt, Artificial Sequence
  Synthetic
agagaaacauucagccuaa

SEQ ID NO: 16589 - RNA, 19 nt, Artificial Sequence
  Synthetic
gguacgagaucuacgacaa

SEQ ID NO: 16590 - RNA, 19 nt, Artificial Sequence
  Synthetic
ccaagauggccaagaagaa

SEQ ID NO: 16591 - RNA, 19 nt, Artificial Sequence
  Synthetic
cagcagaggacaaagaauu

SEQ ID NO: 16592 - RNA, 19 nt, Artificial Sequence
  Synthetic
cauuucaacuggugacaaa

SEQ ID NO: 16593 - RNA, 19 nt, Artificial Sequence
  Synthetic
ggaccggguucgagcagaa

SEQ ID NO: 16594 - RNA, 19 nt, Artificial Sequence
  Synthetic
gcaagaaauuguggccaaa

SEQ ID NO: 16595 - RNA, 19 nt, Artificial Sequence
  Synthetic
ugaucgagauugugaaaga

SEQ ID NO: 16596 - RNA, 19 nt, Artificial Sequence
  Synthetic
acacaaaccuacugaucau

SEQ ID NO: 16597 - RNA, 19 nt, Artificial Sequence
  Synthetic
agcaagaaauuguggccaa

SEQ ID NO: 16598 - RNA, 19 nt, Artificial Sequence
  Synthetic
cgacagacacaaugacaau

SEQ ID NO: 16599 - RNA, 19 nt, Artificial Sequence
  Synthetic
aagaaaucucugauggaua

SEQ ID NO: 16600 - RNA, 19 nt, Artificial Sequence
  Synthetic
gguggaaacugcagagagu

SEQ ID NO: 16601 - RNA, 19 nt, Artificial Sequence
  Synthetic
cacuauggcuugaguuuaa

SEQ ID NO: 16602 - RNA, 19 nt, Artificial Sequence
  Synthetic
cagaggaggugcuguggaa

SEQ ID NO: 16603 - RNA, 19 nt, Artificial Sequence
  Synthetic
cugugaaauuugaaccaua

SEQ ID NO: 16604 - RNA, 19 nt, Artificial Sequence
  Synthetic
guucugaguccaagggcaa

SEQ ID NO: 16605 - RNA, 19 nt, Artificial Sequence
  Synthetic
gaaggaaaccagucgcaua

SEQ ID NO: 16606 - RNA, 19 nt, Artificial Sequence
  Synthetic
caagaacggagaagagauu

SEQ ID NO: 16607 - RNA, 19 nt, Artificial Sequence
  Synthetic
cuuuaaacauggugaugau

SEQ ID NO: 16608 - RNA, 19 nt, Artificial Sequence
  Synthetic
ucaaacaaggagagaaaca

SEQ ID NO: 16609 - RNA, 19 nt, Artificial Sequence
  Synthetic
guuccaggguuaugaauau

SEQ ID NO: 16610 - RNA, 19 nt, Artificial Sequence
  Synthetic
uauugaagcuguagggaaa

SEQ ID NO: 16611 - RNA, 19 nt, Artificial Sequence
  Synthetic
gggaagaagugaaugaaaa

SEQ ID NO: 16612 - RNA, 19 nt, Artificial Sequence
  Synthetic
acgugaaggcaaugagaaa

SEQ ID NO: 16613 - RNA, 19 nt, Artificial Sequence
  Synthetic
gagaaagacgagagaccaa

SEQ ID NO: 16614 - RNA, 19 nt, Artificial Sequence
  Synthetic
guuuaaacgugaaggcaau

SEQ ID NO: 16615 - RNA, 19 nt, Artificial Sequence
  Synthetic
ugaaagaacuggugcuaca

SEQ ID NO: 16616 - RNA, 19 nt, Artificial Sequence
  Synthetic
aggcaaugagaaagaaaua

SEQ ID NO: 16617 - RNA, 19 nt, Artificial Sequence
  Synthetic
gaagaagauuggaagaaga

SEQ ID NO: 16618 - RNA, 19 nt, Artificial Sequence
  Synthetic
uggaagaagacuugaagaa

SEQ ID NO: 16619 - RNA, 19 nt, Artificial Sequence
  Synthetic
ccaaauaccaacaggauca

SEQ ID NO: 16620 - RNA, 19 nt, Artificial Sequence
  Synthetic
ccaacaacgguaugaauaa

SEQ ID NO: 16621 - RNA, 19 nt, Artificial Sequence
  Synthetic
gcagcugaguaucgagaaa

SEQ ID NO: 16622 - RNA, 19 nt, Artificial Sequence
  Synthetic
aguaaagcauugugucaua

SEQ ID NO: 16623 - RNA, 19 nt, Artificial Sequence
  Synthetic
ggaucaaguugucaaagaa

SEQ ID NO: 16624 - RNA, 19 nt, Artificial Sequence
  Synthetic
guaucgagaaauugacaaa

SEQ ID NO: 16625 - RNA, 19 nt, Artificial Sequence
  Synthetic
ccaggaaauccaaaugaaa

SEQ ID NO: 16626 - RNA, 19 nt, Artificial Sequence
  Synthetic
gugaaggcaaugagaaaga

SEQ ID NO: 16627 - RNA, 19 nt, Artificial Sequence
  Synthetic
gguggaagaugaugaagau

SEQ ID NO: 16628 - RNA, 19 nt, Artificial Sequence
  Synthetic
aguuuaaacgugaaggcaa

SEQ ID NO: 16629 - RNA, 19 nt, Artificial Sequence
  Synthetic
cgagggaagaagugaauga

SEQ ID NO: 16630 - RNA, 19 nt, Artificial Sequence
  Synthetic
uggaagaugaugaagauuu

SEQ ID NO: 16631 - RNA, 19 nt, Artificial Sequence
  Synthetic
caguagaagaagauuggaa

SEQ ID NO: 16632 - RNA, 19 nt, Artificial Sequence
  Synthetic
gaaguaaagcauuguguca

SEQ ID NO: 16633 - RNA, 19 nt, Artificial Sequence
  Synthetic
gcaaugagaaagaaauaca

SEQ ID NO: 16634 - RNA, 19 nt, Artificial Sequence
  Synthetic
gcauuaaaccagaccuuau

SEQ ID NO: 16635 - RNA, 19 nt, Artificial Sequence
  Synthetic
agggaagaagugaaugaaa

SEQ ID NO: 16636 - RNA, 19 nt, Artificial Sequence
  Synthetic
guagaagaagauuggaaga

SEQ ID NO: 16637 - RNA, 19 nt, Artificial Sequence
  Synthetic
aagaagacuugaagaagca

SEQ ID NO: 16638 - RNA, 19 nt, Artificial Sequence
  Synthetic
aaacguaugaacagcauua

SEQ ID NO: 16639 - RNA, 19 nt, Artificial Sequence
  Synthetic
gaagauuggaagaagacuu

SEQ ID NO: 16640 - RNA, 19 nt, Artificial Sequence
  Synthetic
gggccagacucaagagaaa

SEQ ID NO: 16641 - RNA, 19 nt, Artificial Sequence
  Synthetic
ggacaagagccgcgaguau

SEQ ID NO: 16642 - RNA, 19 nt, Artificial Sequence
  Synthetic
uuguaagggucauggaaua

SEQ ID NO: 16643 - RNA, 19 nt, Artificial Sequence
  Synthetic
gggaggaggugaacgagaa

SEQ ID NO: 16644 - RNA, 19 nt, Artificial Sequence
  Synthetic
aggaauaccuggagcgcuu

SEQ ID NO: 16645 - RNA, 19 nt, Artificial Sequence
  Synthetic
agaaaugcagcaaggaaua

SEQ ID NO: 16646 - RNA, 19 nt, Artificial Sequence
  Synthetic
gagaaaugcagcaaggaau

SEQ ID NO: 16647 - RNA, 19 nt, Artificial Sequence
  Synthetic
aggaaaggcgggaacaaua

SEQ ID NO: 16648 - RNA, 19 nt, Artificial Sequence
  Synthetic
agaaagagaugcaaaggau

SEQ ID NO: 16649 - RNA, 19 nt, Artificial Sequence
  Synthetic
gcacuugguacgugggcaa

SEQ ID NO: 16650 - RNA, 19 nt, Artificial Sequence
  Synthetic
ggaaaggcgggaacaauaa

SEQ ID NO: 16651 - RNA, 19 nt, Artificial Sequence
  Synthetic
gcgugagggcaacgagaaa

SEQ ID NO: 16652 - RNA, 19 nt, Artificial Sequence
  Synthetic
ccaaauaccagcaggacca

SEQ ID NO: 16653 - RNA, 19 nt, Artificial Sequence
  Synthetic
ggaacaauaagcugaucaa

SEQ ID NO: 16654 - RNA, 19 nt, Artificial Sequence
  Synthetic
gcgaguaugaccagcuuua

SEQ ID NO: 16655 - RNA, 19 nt, Artificial Sequence
  Synthetic
gaugaagcguacugcaauu

SEQ ID NO: 16656 - RNA, 19 nt, Artificial Sequence
  Synthetic
gcgcccagcuuaaggucua

SEQ ID NO: 16657 - RNA, 19 nt, Artificial Sequence
  Synthetic
gcacgcaggcagaggagau

SEQ ID NO: 16658 - RNA, 19 nt, Artificial Sequence
  Synthetic
agagaaaugcagcaaggaa

SEQ ID NO: 16659 - RNA, 19 nt, Artificial Sequence
  Synthetic
ggaggaggugaacgagaaa

SEQ ID NO: 16660 - RNA, 19 nt, Artificial Sequence
  Synthetic
cagaugaagcguacugcaa

SEQ ID NO: 16661 - RNA, 19 nt, Artificial Sequence
  Synthetic
cccaggagcugcagaugaa

SEQ ID NO: 16662 - RNA, 19 nt, Artificial Sequence
  Synthetic
gcaacgagaaagagaugca

SEQ ID NO: 16663 - RNA, 19 nt, Artificial Sequence
  Synthetic
cuagcaagauccagggcga

SEQ ID NO: 16664 - RNA, 19 nt, Artificial Sequence
  Synthetic
gguacgugggcaagaucaa

SEQ ID NO: 16665 - RNA, 19 nt, Artificial Sequence
  Synthetic
ucauggaggacgaggacga

SEQ ID NO: 16666 - RNA, 19 nt, Artificial Sequence
  Synthetic
caagggaggaggugaacga

SEQ ID NO: 16667 - RNA, 19 nt, Artificial Sequence
  Synthetic
gagaaagagaugcaaagga

SEQ ID NO: 16668 - RNA, 19 nt, Artificial Sequence
  Synthetic
gaaccucggccgugacauu

SEQ ID NO: 16669 - RNA, 19 nt, Artificial Sequence
  Synthetic
uguaagggucauggaauaa

SEQ ID NO: 16670 - RNA, 19 nt, Artificial Sequence
  Synthetic
ggagaagaguaaagaguau

SEQ ID NO: 16671 - RNA, 19 nt, Artificial Sequence
  Synthetic
ggacuugcuuuaugggaaa

SEQ ID NO: 16672 - RNA, 19 nt, Artificial Sequence
  Synthetic
cgacagaacugauauuuua

SEQ ID NO: 16673 - RNA, 19 nt, Artificial Sequence
  Synthetic
ggauaucaaucgaguacaa

SEQ ID NO: 16674 - RNA, 19 nt, Artificial Sequence
  Synthetic
gggaggagguaaaugacaa

SEQ ID NO: 16675 - RNA, 19 nt, Artificial Sequence
  Synthetic
gacuagaauuugugaguuu

SEQ ID NO: 16676 - RNA, 19 nt, Artificial Sequence
  Synthetic
caaccgagaaauagauaaa

SEQ ID NO: 16677 - RNA, 19 nt, Artificial Sequence
  Synthetic
caaaggagugagacagaaa

SEQ ID NO: 16678 - RNA, 19 nt, Artificial Sequence
  Synthetic
uuucaagggaggagguaaa

SEQ ID NO: 16679 - RNA, 19 nt, Artificial Sequence
  Synthetic
ccaaauggaaugaaggaca

SEQ ID NO: 16680 - RNA, 19 nt, Artificial Sequence
  Synthetic
auauuaggcuugaugguua

SEQ ID NO: 16681 - RNA, 19 nt, Artificial Sequence
  Synthetic
aaugacaaauugcgggaua

SEQ ID NO: 16682 - RNA, 19 nt, Artificial Sequence
  Synthetic
gaguacaagcagaggacuu

SEQ ID NO: 16683 - RNA, 19 nt, Artificial Sequence
  Synthetic
aguaucaggagaagaguaa

SEQ ID NO: 16684 - RNA, 19 nt, Artificial Sequence
  Synthetic
caaagaauauauugagcga

SEQ ID NO: 16685 - RNA, 19 nt, Artificial Sequence
  Synthetic
gaugaagaggacugcaaua

SEQ ID NO: 16686 - RNA, 19 nt, Artificial Sequence
  Synthetic
gcuuuuagauggcuugaua

SEQ ID NO: 16687 - RNA, 19 nt, Artificial Sequence
  Synthetic
gagaguagcaagaaaggau

SEQ ID NO: 16688 - RNA, 19 nt, Artificial Sequence
  Synthetic
ggaagggaggcaauaauaa

SEQ ID NO: 16689 - RNA, 19 nt, Artificial Sequence
  Synthetic
ccagauaccaacaggauca

SEQ ID NO: 16690 - RNA, 19 nt, Artificial Sequence
  Synthetic
ggaggagguaaaugacaaa

SEQ ID NO: 16691 - RNA, 19 nt, Artificial Sequence
  Synthetic
gaacaacauagcaaagaau

SEQ ID NO: 16692 - RNA, 19 nt, Artificial Sequence
  Synthetic
gggaauuaagaaugaggau

SEQ ID NO: 16693 - RNA, 19 nt, Artificial Sequence
  Synthetic
ucgugagaguagcaagaaa

SEQ ID NO: 16694 - RNA, 19 nt, Artificial Sequence
  Synthetic
gaagaaggcuguuuagguu

SEQ ID NO: 16695 - RNA, 19 nt, Artificial Sequence
  Synthetic
gcccauagcuugaaaguuc

SEQ ID NO: 16696 - RNA, 19 nt, Artificial Sequence
  Synthetic
gcuaaauugaucacuguaa

SEQ ID NO: 16697 - RNA, 19 nt, Artificial Sequence
  Synthetic
gaagaggacugcaauagaa

SEQ ID NO: 16698 - RNA, 19 nt, Artificial Sequence
  Synthetic
cauccuugguucagcacaa

SEQ ID NO: 16699 - RNA, 19 nt, Artificial Sequence
  Synthetic
acuagaacaucccaggaaa

SEQ ID NO: 16700 - RNA, 19 nt, Artificial Sequence
  Synthetic
aaacaaaccuugauggaaa

SEQ ID NO: 16701 - RNA, 19 nt, Artificial Sequence
  Synthetic
gcauaaaucugcugugaau

SEQ ID NO: 16702 - RNA, 19 nt, Artificial Sequence
  Synthetic
ugacagaggaagaggaaga

SEQ ID NO: 16703 - RNA, 19 nt, Artificial Sequence
  Synthetic
guuuagaggcagaagauua

SEQ ID NO: 16704 - RNA, 19 nt, Artificial Sequence
  Synthetic
ggaauuugucauugugaaa

SEQ ID NO: 16705 - RNA, 19 nt, Artificial Sequence
  Synthetic
gugaagguguggaaauaaa

SEQ ID NO: 16706 - RNA, 19 nt, Artificial Sequence
  Synthetic
gcucaguguuuuaaaggaa

SEQ ID NO: 16707 - RNA, 19 nt, Artificial Sequence
  Synthetic
cugaacaagugcuaaauaa

SEQ ID NO: 16708 - RNA, 19 nt, Artificial Sequence
  Synthetic
gcaucuacguggagcauuu

SEQ ID NO: 16709 - RNA, 19 nt, Artificial Sequence
  Synthetic
ggagaguugaagagagcaa

SEQ ID NO: 16710 - RNA, 19 nt, Artificial Sequence
  Synthetic
gauuaugcuuugaggucua

SEQ ID NO: 16711 - RNA, 19 nt, Artificial Sequence
  Synthetic
agugguagcucgucaaaua

SEQ ID NO: 16712 - RNA, 19 nt, Artificial Sequence
  Synthetic
gaaggagagccuaaggaaa

SEQ ID NO: 16713 - RNA, 19 nt, Artificial Sequence
  Synthetic
cuaauaaagcaaaggccaa

SEQ ID NO: 16714 - RNA, 19 nt, Artificial Sequence
  Synthetic
ucaugauaguagucagaaa

SEQ ID NO: 16715 - RNA, 19 nt, Artificial Sequence
  Synthetic
gcuaagcagaugauggaaa

SEQ ID NO: 16716 - RNA, 19 nt, Artificial Sequence
  Synthetic
gaacaagaggagaguugaa

SEQ ID NO: 16717 - RNA, 19 nt, Artificial Sequence
  Synthetic
cagcugaaguguaguguuu

SEQ ID NO: 16718 - RNA, 19 nt, Artificial Sequence
  Synthetic
acacagggcuucaucguaa

SEQ ID NO: 16719 - RNA, 19 nt, Artificial Sequence
  Synthetic
acaagaaccagaugacaaa

SEQ ID NO: 16720 - RNA, 19 nt, Artificial Sequence
  Synthetic
augaaaugguccagcagaa

SEQ ID NO: 16721 - RNA, 19 nt, Artificial Sequence
  Synthetic
cugaaguuguccaggaaau

SEQ ID NO: 16722 - RNA, 19 nt, Artificial Sequence
  Synthetic
cgaauuugccagugauauu

SEQ ID NO: 16723 - RNA, 19 nt, Artificial Sequence
  Synthetic
gaucacaguaucagagaau

SEQ ID NO: 16724 - RNA, 19 nt, Artificial Sequence
  Synthetic
ccacugaguuagaauauau

SEQ ID NO: 16725 - RNA, 19 nt, Artificial Sequence
  Synthetic
cagaggaagaggaagacaa

SEQ ID NO: 16726 - RNA, 19 nt, Artificial Sequence
  Synthetic
cggaggagaacuugcuaua

SEQ ID NO: 16727 - RNA, 19 nt, Artificial Sequence
  Synthetic
aggcagaagauuacuuaaa

SEQ ID NO: 16728 - RNA, 19 nt, Artificial Sequence
  Synthetic
agggaaugacagaggaaga

SEQ ID NO: 16729 - RNA, 19 nt, Artificial Sequence
  Synthetic
guuaagauguacuugacua

SEQ ID NO: 16730 - RNA, 19 nt, Artificial Sequence
  Synthetic
ggauaaagcuauucagaaa

SEQ ID NO: 16731 - RNA, 19 nt, Artificial Sequence
  Synthetic
cuaaaggcgacgagagaaa

SEQ ID NO: 16732 - RNA, 19 nt, Artificial Sequence
  Synthetic
uggcaaggauggaguggaa

SEQ ID NO: 16733 - RNA, 19 nt, Artificial Sequence
  Synthetic
gcucagacuccgaggauga

SEQ ID NO: 16734 - RNA, 19 nt, Artificial Sequence
  Synthetic
ggaucuacauucagcuuua

SEQ ID NO: 16735 - RNA, 19 nt, Artificial Sequence
  Synthetic
ugaacaugauggcggauaa

SEQ ID NO: 16736 - RNA, 19 nt, Artificial Sequence
  Synthetic
gagaagcaguggaaggaca

SEQ ID NO: 16737 - RNA, 19 nt, Artificial Sequence
  Synthetic
aggaauaucugaacaaaca

SEQ ID NO: 16738 - RNA, 19 nt, Artificial Sequence
  Synthetic
gcaacauuaugcuggacaa

SEQ ID NO: 16739 - RNA, 19 nt, Artificial Sequence
  Synthetic
cggaugagauggugaugau

SEQ ID NO: 16740 - RNA, 19 nt, Artificial Sequence
  Synthetic
gaugaaagacggagagaug

SEQ ID NO: 16741 - RNA, 19 nt, Artificial Sequence
  Synthetic
uggugaagcucuacaagua

SEQ ID NO: 16742 - RNA, 19 nt, Artificial Sequence
  Synthetic
acauuaugcuggacaagaa

SEQ ID NO: 16743 - RNA, 19 nt, Artificial Sequence
  Synthetic
gcucccagcugcacaaaua

SEQ ID NO: 16744 - RNA, 19 nt, Artificial Sequence
  Synthetic
acacagaagccauugggaa

SEQ ID NO: 16745 - RNA, 19 nt, Artificial Sequence
  Synthetic
ggaagcaagucaacccaaa

SEQ ID NO: 16746 - RNA, 19 nt, Artificial Sequence
  Synthetic
acggagagaugcagugauu

SEQ ID NO: 16747 - RNA, 19 nt, Artificial Sequence
  Synthetic
gcaucaagcuaucugagaa

SEQ ID NO: 16748 - RNA, 19 nt, Artificial Sequence
  Synthetic
cugagaagcugcaguccaa

SEQ ID NO: 16749 - RNA, 19 nt, Artificial Sequence
  Synthetic
gguccguccuccaguauaa

SEQ ID NO: 16750 - RNA, 19 nt, Artificial Sequence
  Synthetic
gacauaagcaucaugauua

SEQ ID NO: 16751 - RNA, 19 nt, Artificial Sequence
  Synthetic
ccacugagaucgagcgucu

SEQ ID NO: 16752 - RNA, 19 nt, Artificial Sequence
  Synthetic
gagagaacagcguggccaa

SEQ ID NO: 16753 - RNA, 19 nt, Artificial Sequence
  Synthetic
ccuguuuucugcugagaua

SEQ ID NO: 16754 - RNA, 19 nt, Artificial Sequence
  Synthetic
ggacugugcugaagaccau

SEQ ID NO: 16755 - RNA, 19 nt, Artificial Sequence
  Synthetic
agacauaagcaucaugauu

SEQ ID NO: 16756 - RNA, 19 nt, Artificial Sequence
  Synthetic
cccuaaaggcgacgagaga

SEQ ID NO: 16757 - RNA, 19 nt, Artificial Sequence
  Synthetic
gguacgacaagaugggcua

SEQ ID NO: 16758 - RNA, 19 nt, Artificial Sequence
  Synthetic
gguuugagaucgccaagua

SEQ ID NO: 16759 - RNA, 19 nt, Artificial Sequence
  Synthetic
gcggcugcgugaagacaua

SEQ ID NO: 16760 - RNA, 19 nt, Artificial Sequence
  Synthetic
ggagaugggugaugaggua

SEQ ID NO: 16761 - RNA, 19 nt, Artificial Sequence
  Synthetic
ggaaauggaaggcaagaaa

SEQ ID NO: 16762 - RNA, 19 nt, Artificial Sequence
  Synthetic
ggacagacacaaugggaau

SEQ ID NO: 16763 - RNA, 19 nt, Artificial Sequence
  Synthetic
gccaggagguguuggagaa

SEQ ID NO: 16764 - RNA, 19 nt, Artificial Sequence
  Synthetic
cggcagaacaacucagcua

SEQ ID NO: 16765 - RNA, 19 nt, Artificial Sequence
  Synthetic
gcaacgaggacguggacuu

SEQ ID NO: 16766 - RNA, 19 nt, Artificial Sequence
  Synthetic
caagaaacacgaaggauca

SEQ ID NO: 16767 - RNA, 19 nt, Artificial Sequence
  Synthetic
gcugauugccgcucggaaa

SEQ ID NO: 16768 - RNA, 19 nt, Artificial Sequence
  Synthetic
acccuaaaguggagaauga

SEQ ID NO: 16769 - RNA, 19 nt, Artificial Sequence
  Synthetic
gcagaacaacucagcuaaa

SEQ ID NO: 16770 - RNA, 19 nt, Artificial Sequence
  Synthetic
uggaugaggacguggguga

SEQ ID NO: 16771 - RNA, 19 nt, Artificial Sequence
  Synthetic
gcguggaaauugaaugaga

SEQ ID NO: 16772 - RNA, 19 nt, Artificial Sequence
  Synthetic
caaggagccuggaguacaa

SEQ ID NO: 16773 - RNA, 19 nt, Artificial Sequence
  Synthetic
ggaucaagccauacaagau

SEQ ID NO: 16774 - RNA, 19 nt, Artificial Sequence
  Synthetic
ggacgugggugaugccauu

SEQ ID NO: 16775 - RNA, 19 nt, Artificial Sequence
  Synthetic
uggacaagguggugcagau

SEQ ID NO: 16776 - RNA, 19 nt, Artificial Sequence
  Synthetic
ggcaagagcuucuggccuu

SEQ ID NO: 16777 - RNA, 19 nt, Artificial Sequence
  Synthetic
agaucagggaggaggaaga

SEQ ID NO: 16778 - RNA, 19 nt, Artificial Sequence
  Synthetic
ccacuaagagggaugaaca

SEQ ID NO: 16779 - RNA, 19 nt, Artificial Sequence
  Synthetic
ccacauagaaguuugcuuu

SEQ ID NO: 16780 - RNA, 19 nt, Artificial Sequence
  Synthetic
gcaccgagaguauugauaa

SEQ ID NO: 16781 - RNA, 19 nt, Artificial Sequence
  Synthetic
caaacgagacccagaagau

SEQ ID NO: 16782 - RNA, 19 nt, Artificial Sequence
  Synthetic
gagaaaguacggcggauca

SEQ ID NO: 16783 - RNA, 19 nt, Artificial Sequence
  Synthetic
gcaaggagccuguguucau

SEQ ID NO: 16784 - RNA, 19 nt, Artificial Sequence
  Synthetic
agucaaggacagacacaau

SEQ ID NO: 16785 - RNA, 19 nt, Artificial Sequence
  Synthetic
gcaaaguugugcuggguac

SEQ ID NO: 16786 - RNA, 19 nt, Artificial Sequence
  Synthetic
ucaccagccaggagagcaa

SEQ ID NO: 16787 - RNA, 19 nt, Artificial Sequence
  Synthetic
gggaggaggaagaugagau

SEQ ID NO: 16788 - RNA, 19 nt, Artificial Sequence
  Synthetic
ccuccagcaccgagaguau

SEQ ID NO: 16789 - RNA, 19 nt, Artificial Sequence
  Synthetic
gauuacacuugguugacua

SEQ ID NO: 16790 - RNA, 19 nt, Artificial Sequence
  Synthetic
ccaucaaacacguggagaa

SEQ ID NO: 16791 - RNA, 19 nt, Artificial Sequence
  Synthetic
gcacaaaccaagcaaucaa

SEQ ID NO: 16792 - RNA, 19 nt, Artificial Sequence
  Synthetic
gggagaaauacuugaacuu

SEQ ID NO: 16793 - RNA, 19 nt, Artificial Sequence
  Synthetic
ucgaagaaauccagaacca

SEQ ID NO: 16794 - RNA, 19 nt, Artificial Sequence
  Synthetic
caucaugaguucugcugaa

SEQ ID NO: 16795 - RNA, 19 nt, Artificial Sequence
  Synthetic
ggauaggacuagcacauuu

SEQ ID NO: 16796 - RNA, 19 nt, Artificial Sequence
  Synthetic
cgaugggacccgaguguau

SEQ ID NO: 16797 - RNA, 19 nt, Artificial Sequence
  Synthetic
ucaaacacguggagaagga

SEQ ID NO: 16798 - RNA, 19 nt, Artificial Sequence
  Synthetic
ccaggaaacugcugagauc

SEQ ID NO: 16799 - RNA, 19 nt, Artificial Sequence
  Synthetic
gauaugguguguggagaua

SEQ ID NO: 16800 - RNA, 19 nt, Artificial Sequence
  Synthetic
uggaagugguccugcugaa

SEQ ID NO: 16801 - RNA, 19 nt, Artificial Sequence
  Synthetic
agauauuccuuucgagcau

SEQ ID NO: 16802 - RNA, 19 nt, Artificial Sequence
  Synthetic
gacuguguauauaggauaa

SEQ ID NO: 16803 - RNA, 19 nt, Artificial Sequence
  Synthetic
ugaaaggugccauggaaga

SEQ ID NO: 16804 - RNA, 19 nt, Artificial Sequence
  Synthetic
uggcaugguaguauacaaa

SEQ ID NO: 16805 - RNA, 19 nt, Artificial Sequence
  Synthetic
ggccaaccuucgaagaaau

SEQ ID NO: 16806 - RNA, 19 nt, Artificial Sequence
  Synthetic
ucucauagguguccagcau

SEQ ID NO: 16807 - RNA, 19 nt, Artificial Sequence
  Synthetic
gauacaggaacaacauuua

SEQ ID NO: 16808 - RNA, 19 nt, Artificial Sequence
  Synthetic
uauacuugcguuuggaaua

SEQ ID NO: 16809 - RNA, 19 nt, Artificial Sequence
  Synthetic
ugaaagaugcgcauucuaa

SEQ ID NO: 16810 - RNA, 19 nt, Artificial Sequence
  Synthetic
aggccaaccuucgaagaaa

SEQ ID NO: 16811 - RNA, 19 nt, Artificial Sequence
  Synthetic
ucgagaggcccgacaguuu

SEQ ID NO: 16812 - RNA, 19 nt, Artificial Sequence
  Synthetic
ugauaugguguguggagau

SEQ ID NO: 16813 - RNA, 19 nt, Artificial Sequence
  Synthetic
caguuggcaugguaguaua

SEQ ID NO: 16814 - RNA, 19 nt, Artificial Sequence
  Synthetic
ugacuguguauauaggaua

SEQ ID NO: 16815 - RNA, 19 nt, Artificial Sequence
  Synthetic
guggagaaggaccggauuu

SEQ ID NO: 16816 - RNA, 19 nt, Artificial Sequence
  Synthetic
ggauccugcuguaugauau

SEQ ID NO: 16817 - RNA, 19 nt, Artificial Sequence
  Synthetic
accaagcaaucaacagaaa

SEQ ID NO: 16818 - RNA, 19 nt, Artificial Sequence
  Synthetic
guguauagcccuccagagu

SEQ ID NO: 16819 - RNA, 19 nt, Artificial Sequence
  Synthetic
guaaauguguguacaguug

SEQ ID NO: 16820 - RNA, 19 nt, Artificial Sequence
  Synthetic
gguaagggauugaggauca

SEQ ID NO: 16821 - RNA, 19 nt, Artificial Sequence
  Synthetic
ggucauuaccagucauuaa

SEQ ID NO: 16822 - RNA, 19 nt, Artificial Sequence
  Synthetic
ggaaauaaggcuugcuguu

SEQ ID NO: 16823 - RNA, 19 nt, Artificial Sequence
  Synthetic
ggaaguuuauuuuggugaa

SEQ ID NO: 16824 - RNA, 19 nt, Artificial Sequence
  Synthetic
gugccaaacucauugauuu

SEQ ID NO: 16825 - RNA, 19 nt, Artificial Sequence
  Synthetic
guuagaagacauaaaccaa

SEQ ID NO: 16826 - RNA, 19 nt, Artificial Sequence
  Synthetic
aggaugggauggaugguuu

SEQ ID NO: 16827 - RNA, 19 nt, Artificial Sequence
  Synthetic
cccaguagcuuuuauuuua

SEQ ID NO: 16828 - RNA, 19 nt, Artificial Sequence
  Synthetic
ccuacuaccaccacacaaa

SEQ ID NO: 16829 - RNA, 19 nt, Artificial Sequence
  Synthetic
augagaacauccugauaga

SEQ ID NO: 16830 - RNA, 19 nt, Artificial Sequence
  Synthetic
ggaaggaauggaagaugga

SEQ ID NO: 16831 - RNA, 19 nt, Artificial Sequence
  Synthetic
gagaagaaccuuaauucca

SEQ ID NO: 16832 - RNA, 19 nt, Artificial Sequence
  Synthetic
gaacauccugauagaccua

SEQ ID NO: 16833 - RNA, 19 nt, Artificial Sequence
  Synthetic
uggaagagauccugcugga

SEQ ID NO: 16834 - RNA, 19 nt, Artificial Sequence
  Synthetic
gcaaacaccagccgaggau

SEQ ID NO: 16835 - RNA, 19 nt, Artificial Sequence
  Synthetic
uugacugguuugagacaca

SEQ ID NO: 16836 - RNA, 19 nt, Artificial Sequence
  Synthetic
aggagauucuggaagcuga

SEQ ID NO: 16837 - RNA, 19 nt, Artificial Sequence
  Synthetic
cccaggaucucuuugacua

SEQ ID NO: 16838 - RNA, 19 nt, Artificial Sequence
  Synthetic
cugcuugacugguuugaga

SEQ ID NO: 16839 - RNA, 19 nt, Artificial Sequence
  Synthetic
agggauagauggacauuug

SEQ ID NO: 16840 - RNA, 19 nt, Artificial Sequence
  Synthetic
gaaauaaggcuugcuguuu

SEQ ID NO: 16841 - RNA, 19 nt, Artificial Sequence
  Synthetic
gaagaaccuuaauuccaua

SEQ ID NO: 16842 - RNA, 19 nt, Artificial Sequence
  Synthetic
ccaccuccauguugaccaa

SEQ ID NO: 16843 - RNA, 19 nt, Artificial Sequence
  Synthetic
uggugaaguuguucccauu

SEQ ID NO: 16844 - RNA, 19 nt, Artificial Sequence
  Synthetic
ggugagaagaaccuuaauu

SEQ ID NO: 16845 - RNA, 19 nt, Artificial Sequence
  Synthetic
agaagaaccuuaauuccau

SEQ ID NO: 16846 - RNA, 19 nt, Artificial Sequence
  Synthetic
gauugaggaucagggguua

SEQ ID NO: 16847 - RNA, 19 nt, Artificial Sequence
  Synthetic
uagaagacauaaaccaagu

SEQ ID NO: 16848 - RNA, 19 nt, Artificial Sequence
  Synthetic
augaugaacccuacacuga

SEQ ID NO: 16849 - RNA, 19 nt, Artificial Sequence
  Synthetic
gugaaguuguucccauuuu

SEQ ID NO: 16850 - RNA, 19 nt, Artificial Sequence
  Synthetic
gcauggagcuggugaauua

SEQ ID NO: 16851 - RNA, 19 nt, Artificial Sequence
  Synthetic
uggaagaacuugagugaga

SEQ ID NO: 16852 - RNA, 19 nt, Artificial Sequence
  Synthetic
caguaaagguugucuucaa

SEQ ID NO: 16853 - RNA, 19 nt, Artificial Sequence
  Synthetic
caagagaggucccaagcaa

SEQ ID NO: 16854 - RNA, 19 nt, Artificial Sequence
  Synthetic
gagcagucacuuacagaaa

SEQ ID NO: 16855 - RNA, 19 nt, Artificial Sequence
  Synthetic
agagaaguguuguguggaa

SEQ ID NO: 16856 - RNA, 19 nt, Artificial Sequence
  Synthetic
gcgcagagagggcugguua

SEQ ID NO: 16857 - RNA, 19 nt, Artificial Sequence
  Synthetic
uggcuaaccuggaguguga

SEQ ID NO: 16858 - RNA, 19 nt, Artificial Sequence
  Synthetic
uggaccagcuacugaauua

SEQ ID NO: 16859 - RNA, 19 nt, Artificial Sequence
  Synthetic
gagaaguguuguguggaaa

SEQ ID NO: 16860 - RNA, 19 nt, Artificial Sequence
  Synthetic
gcuuucggcuggaggagua

SEQ ID NO: 16861 - RNA, 19 nt, Artificial Sequence
  Synthetic
gaacugaauauuuggcuuu

SEQ ID NO: 16862 - RNA, 19 nt, Artificial Sequence
  Synthetic
ugaagaaucugaaguuaga

SEQ ID NO: 16863 - RNA, 19 nt, Artificial Sequence
  Synthetic
gggcuuggcaaauggaaga

SEQ ID NO: 16864 - RNA, 19 nt, Artificial Sequence
  Synthetic
uagcgaaagugacggauga

SEQ ID NO: 16865 - RNA, 19 nt, Artificial Sequence
  Synthetic
ccaacaggcucacagagaa

SEQ ID NO: 16866 - RNA, 19 nt, Artificial Sequence
  Synthetic
ccugaagaaucugaaguua

SEQ ID NO: 16867 - RNA, 19 nt, Artificial Sequence
  Synthetic
uggccaagcuggucuagua

SEQ ID NO: 16868 - RNA, 19 nt, Artificial Sequence
  Synthetic
gcgagaggccagcaagaga

SEQ ID NO: 16869 - RNA, 19 nt, Artificial Sequence
  Synthetic
ccuucuacggccagggcaa

SEQ ID NO: 16870 - RNA, 19 nt, Artificial Sequence
  Synthetic
cagcguagcaugucugauu

SEQ ID NO: 16871 - RNA, 19 nt, Artificial Sequence
  Synthetic
gcaaaugugcuucaucuaa

SEQ ID NO: 16872 - RNA, 19 nt, Artificial Sequence
  Synthetic
gucaggagauccaggcaau

SEQ ID NO: 16873 - RNA, 19 nt, Artificial Sequence
  Synthetic
gggcagucuuucuggccuu

SEQ ID NO: 16874 - RNA, 19 nt, Artificial Sequence
  Synthetic
cggguugcuuccagggaga

SEQ ID NO: 16875 - RNA, 19 nt, Artificial Sequence
  Synthetic
aauggaagaacuugaguga

SEQ ID NO: 16876 - RNA, 19 nt, Artificial Sequence
  Synthetic
gggucagcacguucaguua

SEQ ID NO: 16877 - RNA, 19 nt, Artificial Sequence
  Synthetic
cuaugaaaucuucgggcuu

SEQ ID NO: 16878 - RNA, 19 nt, Artificial Sequence
  Synthetic
gagccaucgccuaugaaau

SEQ ID NO: 16879 - RNA, 19 nt, Artificial Sequence
  Synthetic
gcagcuaccaagaggcuca

SEQ ID NO: 16880 - RNA, 19 nt, Artificial Sequence
  Synthetic
cugcagagcuucaagauaa

SEQ ID NO: 16881 - RNA, 19 nt, Artificial Sequence
  Synthetic
aggaagaaccggauugaaa

SEQ ID NO: 16882 - RNA, 19 nt, Artificial Sequence
  Synthetic
gaagagaagaguagugauu

SEQ ID NO: 16883 - RNA, 19 nt, Artificial Sequence
  Synthetic
gcuugaaguugcagaguca

SEQ ID NO: 16884 - RNA, 19 nt, Artificial Sequence
  Synthetic
cagaagaccuggaacaaga

SEQ ID NO: 16885 - RNA, 19 nt, Artificial Sequence
  Synthetic
guaccaaaccagagcguga

SEQ ID NO: 16886 - RNA, 19 nt, Artificial Sequence
  Synthetic
caacaaaggcagaagugga

SEQ ID NO: 16887 - RNA, 19 nt, Artificial Sequence
  Synthetic
ggauaaggguguuuaacca

SEQ ID NO: 16888 - RNA, 19 nt, Artificial Sequence
  Synthetic
cagacuagcuggcacauua

SEQ ID NO: 16889 - RNA, 19 nt, Artificial Sequence
  Synthetic
ccagaaagagcgagagaag

SEQ ID NO: 16890 - RNA, 19 nt, Artificial Sequence
  Synthetic
ccggaauaguaaaggggaa

SEQ ID NO: 16891 - RNA, 19 nt, Artificial Sequence
  Synthetic
ucuacgugguugagaguau

SEQ ID NO: 16892 - RNA, 19 nt, Artificial Sequence
  Synthetic
acacaaggcacaagugaca

SEQ ID NO: 16893 - RNA, 19 nt, Artificial Sequence
  Synthetic
gcccuuaagcagugaaaca

SEQ ID NO: 16894 - RNA, 19 nt, Artificial Sequence
  Synthetic
cugccaggcuauaguaauu

SEQ ID NO: 16895 - RNA, 19 nt, Artificial Sequence
  Synthetic
gcgcaaagccucagaagac

SEQ ID NO: 16896 - RNA, 19 nt, Artificial Sequence
  Synthetic
aggcacaagugacaacaaa

SEQ ID NO: 16897 - RNA, 19 nt, Artificial Sequence
  Synthetic
agucagaguucacccauua

SEQ ID NO: 16898 - RNA, 19 nt, Artificial Sequence
  Synthetic
cggaauaguaaaggggaaa

SEQ ID NO: 16899 - RNA, 19 nt, Artificial Sequence
  Synthetic
gaucagaacuccagaagug

SEQ ID NO: 16900 - RNA, 19 nt, Artificial Sequence
  Synthetic
gcaacacaguauuuaagaa

SEQ ID NO: 16901 - RNA, 19 nt, Artificial Sequence
  Synthetic
ccagaaguguugacaagau

SEQ ID NO: 16902 - RNA, 19 nt, Artificial Sequence
  Synthetic
gcacauuaucccuaccuua

SEQ ID NO: 16903 - RNA, 19 nt, Artificial Sequence
  Synthetic
gaaaggugccauccaguua

SEQ ID NO: 16904 - RNA, 19 nt, Artificial Sequence
  Synthetic
ggaaagcccugguacauga

SEQ ID NO: 16905 - RNA, 19 nt, Artificial Sequence
  Synthetic
ggacuuugcugccuaaauu

SEQ ID NO: 16906 - RNA, 19 nt, Artificial Sequence
  Synthetic
uggcaagaacauucggauu

SEQ ID NO: 16907 - RNA, 19 nt, Artificial Sequence
  Synthetic
gcagugagccgcugauuga

SEQ ID NO: 16908 - RNA, 19 nt, Artificial Sequence
  Synthetic
gugaagacuuaccaaauga

SEQ ID NO: 16909 - RNA, 19 nt, Artificial Sequence
  Synthetic
guggaaagcgguuaaacuu

SEQ ID NO: 16910 - RNA, 19 nt, Artificial Sequence
  Synthetic
ccguaaagagagagagaaa

SEQ ID NO: 16911 - RNA, 19 nt, Artificial Sequence
  Synthetic
gcacaaagaagcugaguuu

SEQ ID NO: 16912 - RNA, 19 nt, Artificial Sequence
  Synthetic
gcuucaagaucauggauua

SEQ ID NO: 16913 - RNA, 19 nt, Artificial Sequence
  Synthetic
cugcaaucauauagguuaa

SEQ ID NO: 16914 - RNA, 19 nt, Artificial Sequence
  Synthetic
uauccaggguccagggaaa

SEQ ID NO: 16915 - RNA, 19 nt, Artificial Sequence
  Synthetic
cuagaaagcuucaagauca

SEQ ID NO: 16916 - RNA, 19 nt, Artificial Sequence
  Synthetic
uaggauacacaguggguaa

SEQ ID NO: 16917 - RNA, 19 nt, Artificial Sequence
  Synthetic
caaccugacuuaagaguuu

SEQ ID NO: 16918 - RNA, 19 nt, Artificial Sequence
  Synthetic
ccuauggacuuuugcauua

SEQ ID NO: 16919 - RNA, 19 nt, Artificial Sequence
  Synthetic
cuggaaagcucuuguuuau

SEQ ID NO: 16920 - RNA, 19 nt, Artificial Sequence
  Synthetic
acguauaagcgaagagcau

SEQ ID NO: 16921 - RNA, 19 nt, Artificial Sequence
  Synthetic
cagcagaugggaugugaaa

SEQ ID NO: 16922 - RNA, 19 nt, Artificial Sequence
  Synthetic
ucuaagaaacggugcaauu

SEQ ID NO: 16923 - RNA, 19 nt, Artificial Sequence
  Synthetic
gcgaagagcaucccguaaa

SEQ ID NO: 16924 - RNA, 19 nt, Artificial Sequence
  Synthetic
ggagagaggugaaagaaac

SEQ ID NO: 16925 - RNA, 19 nt, Artificial Sequence
  Synthetic
guaaagagagagagaaauc

SEQ ID NO: 16926 - RNA, 19 nt, Artificial Sequence
  Synthetic
guucauagaccaagcuuuu

SEQ ID NO: 16927 - RNA, 19 nt, Artificial Sequence
  Synthetic
ucaaagagaaagaggagga

SEQ ID NO: 16928 - RNA, 19 nt, Artificial Sequence
  Synthetic
aaagaaaccuggcaaagaa

SEQ ID NO: 16929 - RNA, 19 nt, Artificial Sequence
  Synthetic
caacauuuaccuuggaaga

SEQ ID NO: 16930 - RNA, 19 nt, Artificial Sequence
  Synthetic
ggacuuagauuuccugcaa

SEQ ID NO: 16931 - RNA, 19 nt, Artificial Sequence
  Synthetic
ugacaaugcuucugugcuu

SEQ ID NO: 16932 - RNA, 19 nt, Artificial Sequence
  Synthetic
gugcaugcauccagugauu

SEQ ID NO: 16933 - RNA, 19 nt, Artificial Sequence
  Synthetic
uggaagugcaggaugacaa

SEQ ID NO: 16934 - RNA, 19 nt, Artificial Sequence
  Synthetic
aggaauggaaggaugagaa

SEQ ID NO: 16935 - RNA, 19 nt, Artificial Sequence
  Synthetic
gugaagaacugcaugaacu

SEQ ID NO: 16936 - RNA, 19 nt, Artificial Sequence
  Synthetic
gaccagugaugaugaauuu

SEQ ID NO: 16937 - RNA, 19 nt, Artificial Sequence
  Synthetic
gguuaaugaagaaguuaga

SEQ ID NO: 16938 - RNA, 19 nt, Artificial Sequence
  Synthetic
gggaggcauuccagcuaaa

SEQ ID NO: 16939 - RNA, 19 nt, Artificial Sequence
  Synthetic
gcacaguuauggcagagaa

SEQ ID NO: 16940 - RNA, 19 nt, Artificial Sequence
  Synthetic
uagagaagcuagugacaaa

SEQ ID NO: 16941 - RNA, 19 nt, Artificial Sequence
  Synthetic
aaauaaagguggacaauca

SEQ ID NO: 16942 - RNA, 19 nt, Artificial Sequence
  Synthetic
ggaauuaagugccaugaaa

SEQ ID NO: 16943 - RNA, 19 nt, Artificial Sequence
  Synthetic
acaacauccugaagaaaua

SEQ ID NO: 16944 - RNA, 19 nt, Artificial Sequence
  Synthetic
aggaggaaguggaguguga

SEQ ID NO: 16945 - RNA, 19 nt, Artificial Sequence
  Synthetic
agaccaagaccaagaagaa

SEQ ID NO: 16946 - RNA, 19 nt, Artificial Sequence
  Synthetic
ggguaaaccacucgaucaa

SEQ ID NO: 16947 - RNA, 19 nt, Artificial Sequence
  Synthetic
gcuuaauguugauggaguu

SEQ ID NO: 16948 - RNA, 19 nt, Artificial Sequence
  Synthetic
gugaagacguggccgaaau

SEQ ID NO: 16949 - RNA, 19 nt, Artificial Sequence
  Synthetic
cugccaacucugaaagaua

SEQ ID NO: 16950 - RNA, 19 nt, Artificial Sequence
  Synthetic
uguugauggaguugaaaua

SEQ ID NO: 16951 - RNA, 19 nt, Artificial Sequence
  Synthetic
cgagcaagaccaagaccaa

SEQ ID NO: 16952 - RNA, 19 nt, Artificial Sequence
  Synthetic
gaucaagauuuccagaauu

SEQ ID NO: 16953 - RNA, 19 nt, Artificial Sequence
  Synthetic
agaaauaccaccaguacau

SEQ ID NO: 16954 - RNA, 19 nt, Artificial Sequence
  Synthetic
gaagcuagugacaaagaaa

SEQ ID NO: 16955 - RNA, 19 nt, Artificial Sequence
  Synthetic
gagccgaacaggaggaagu

SEQ ID NO: 16956 - RNA, 19 nt, Artificial Sequence
  Synthetic
gauacaucaucaagacuau

SEQ ID NO: 16957 - RNA, 19 nt, Artificial Sequence
  Synthetic
gcacaacauccugaagaaa

SEQ ID NO: 16958 - RNA, 19 nt, Artificial Sequence
  Synthetic
caagaaauguauucagcca

SEQ ID NO: 16959 - RNA, 19 nt, Artificial Sequence
  Synthetic
aaccaaacucagugaagua

SEQ ID NO: 16960 - RNA, 19 nt, Artificial Sequence
  Synthetic
ugaucaagauuuccagaau

SEQ ID NO: 16961 - RNA, 19 nt, Artificial Sequence
  Synthetic
cuucaaagccuauucaaaa

SEQ ID NO: 16962 - RNA, 19 nt, Artificial Sequence
  Synthetic
aaguggagugugaggagaa

SEQ ID NO: 16963 - RNA, 19 nt, Artificial Sequence
  Synthetic
acaucgacgucuauggaau

SEQ ID NO: 16964 - RNA, 19 nt, Artificial Sequence
  Synthetic
gcuacucgcuuuacagcua

SEQ ID NO: 16965 - RNA, 19 nt, Artificial Sequence
  Synthetic
gaauuaagugccaugaaaa

SEQ ID NO: 16966 - RNA, 19 nt, Artificial Sequence
  Synthetic
agguguacuucauggcaau

SEQ ID NO: 16967 - RNA, 19 nt, Artificial Sequence
  Synthetic
cagaugacuucaaagccua

SEQ ID NO: 16968 - RNA, 19 nt, Artificial Sequence
  Synthetic
ccgugaacccagaacagua

SEQ ID NO: 16969 - RNA, 19 nt, Artificial Sequence
  Synthetic
gcgggagagguuuggaauu

SEQ ID NO: 16970 - RNA, 19 nt, Artificial Sequence
  Synthetic
gagaugacuucguggguuu

SEQ ID NO: 16971 - RNA, 19 nt, Artificial Sequence
  Synthetic
gcauauaggucaggaaaga

SEQ ID NO: 16972 - RNA, 19 nt, Artificial Sequence
  Synthetic
ccaagaaggagguguauuu

SEQ ID NO: 16973 - RNA, 19 nt, Artificial Sequence
  Synthetic
gugaagaucgcuugugaaa

SEQ ID NO: 16974 - RNA, 19 nt, Artificial Sequence
  Synthetic
gcgacaaggagaaggccaa

SEQ ID NO: 16975 - RNA, 19 nt, Artificial Sequence
  Synthetic
agugaaaacuguugcauua

SEQ ID NO: 16976 - RNA, 19 nt, Artificial Sequence
  Synthetic
ggacgaggagugugagaau

SEQ ID NO: 16977 - RNA, 19 nt, Artificial Sequence
  Synthetic
ccaacuggcucauggagaa

SEQ ID NO: 16978 - RNA, 19 nt, Artificial Sequence
  Synthetic
ccucauguuuaaaugguua

SEQ ID NO: 16979 - RNA, 19 nt, Artificial Sequence
  Synthetic
agaucaagguggacaauca

SEQ ID NO: 16980 - RNA, 19 nt, Artificial Sequence
  Synthetic
gcaagaucaagguggacaa

SEQ ID NO: 16981 - RNA, 19 nt, Artificial Sequence
  Synthetic
cgaucaaugagcugagcaa

SEQ ID NO: 16982 - RNA, 19 nt, Artificial Sequence
  Synthetic
ggucagacuuguagauaac

SEQ ID NO: 16983 - RNA, 19 nt, Artificial Sequence
  Synthetic
aggagaaggccaaggacuu

SEQ ID NO: 16984 - RNA, 19 nt, Artificial Sequence
  Synthetic
gaaugaaacuccaucucaa

SEQ ID NO: 16985 - RNA, 19 nt, Artificial Sequence
  Synthetic
ggaaagggauuauguagga

SEQ ID NO: 16986 - RNA, 19 nt, Artificial Sequence
  Synthetic
agaaauaccaccaguuuau

SEQ ID NO: 16987 - RNA, 19 nt, Artificial Sequence
  Synthetic
gccagaaagugaagcuauu

SEQ ID NO: 16988 - RNA, 19 nt, Artificial Sequence
  Synthetic
ccagcaagaccaagaccaa

SEQ ID NO: 16989 - RNA, 19 nt, Artificial Sequence
  Synthetic
uggagaaacugaagcggga

SEQ ID NO: 16990 - RNA, 19 nt, Artificial Sequence
  Synthetic
cuagaguaccuuuggauuu

SEQ ID NO: 16991 - RNA, 19 nt, Artificial Sequence
  Synthetic
aguuuauaguggaguguca

SEQ ID NO: 16992 - RNA, 19 nt, Artificial Sequence
  Synthetic
augugggagaggagaguaa

SEQ ID NO: 16993 - RNA, 19 nt, Artificial Sequence
  Synthetic
ggaauaaguucauccucau

SEQ ID NO: 16994 - RNA, 19 nt, Artificial Sequence
  Synthetic
acuucaaagccuacagcaa

SEQ ID NO: 16995 - RNA, 19 nt, Artificial Sequence
  Synthetic
ggcaacauguuaugaauga

SEQ ID NO: 16996 - RNA, 19 nt, Artificial Sequence
  Synthetic
gaucaggauuaccagaauu

SEQ ID NO: 16997 - RNA, 19 nt, Artificial Sequence
  Synthetic
gggugaaccacacgaucaa

SEQ ID NO: 16998 - RNA, 19 nt, Artificial Sequence
  Synthetic
gcuccaagaucaaggucaa

SEQ ID NO: 16999 - RNA, 19 nt, Artificial Sequence
  Synthetic
ccuccaagaccaagaagaa

SEQ ID NO: 17000 - RNA, 19 nt, Artificial Sequence
  Synthetic
gcgauaaggaaaagguuaa

SEQ ID NO: 17001 - RNA, 19 nt, Artificial Sequence
  Synthetic
gugaagaggagaagaaaau

SEQ ID NO: 17002 - RNA, 19 nt, Artificial Sequence
  Synthetic
gaagagagauguggaguuu

SEQ ID NO: 17003 - RNA, 19 nt, Artificial Sequence
  Synthetic
ucaaagaaguauccaguga

SEQ ID NO: 17004 - RNA, 19 nt, Artificial Sequence
  Synthetic
acaagaaccagaaaguaua

SEQ ID NO: 17005 - RNA, 19 nt, Artificial Sequence
  Synthetic
gcauugaugaccaagauua

SEQ ID NO: 17006 - RNA, 19 nt, Artificial Sequence
  Synthetic
auuucaaguucaaggagua

SEQ ID NO: 17007 - RNA, 19 nt, Artificial Sequence
  Synthetic
cagcgaaagugaaggcagu

SEQ ID NO: 17008 - RNA, 19 nt, Artificial Sequence
  Synthetic
ggugaagaggagaagaaaa

SEQ ID NO: 17009 - RNA, 19 nt, Artificial Sequence
  Synthetic
aguaugaugccaagaagaa

SEQ ID NO: 17010 - RNA, 19 nt, Artificial Sequence
  Synthetic
ccagaugacuuuaaggcca

SEQ ID NO: 17011 - RNA, 19 nt, Artificial Sequence
  Synthetic
aacaagaaccagaaaguau

SEQ ID NO: 17012 - RNA, 19 nt, Artificial Sequence
  Synthetic
ggaaaagguuaaagaauug

SEQ ID NO: 17013 - RNA, 19 nt, Artificial Sequence
  Synthetic
agcugaagaucauggacua

SEQ ID NO: 17014 - RNA, 19 nt, Artificial Sequence
  Synthetic
ccgaaaugccuuagaggaa

SEQ ID NO: 17015 - RNA, 19 nt, Artificial Sequence
  Synthetic
cugaagaaggugacgauaa

SEQ ID NO: 17016 - RNA, 19 nt, Artificial Sequence
  Synthetic
uaacaaagagagagcagaa

SEQ ID NO: 17017 - RNA, 19 nt, Artificial Sequence
  Synthetic
ggcacaagcuauagcaauu

SEQ ID NO: 17018 - RNA, 19 nt, Artificial Sequence
  Synthetic
agaacaacacugagaagaa

SEQ ID NO: 17019 - RNA, 19 nt, Artificial Sequence
  Synthetic
uggcaaaucaggaagcaaa

SEQ ID NO: 17020 - RNA, 19 nt, Artificial Sequence
  Synthetic
ccaacugcauuguaggaaa

SEQ ID NO: 17021 - RNA, 19 nt, Artificial Sequence
  Synthetic
gaauggaguuucaggauca

SEQ ID NO: 17022 - RNA, 19 nt, Artificial Sequence
  Synthetic
cagagggacagcagggaaa

SEQ ID NO: 17023 - RNA, 19 nt, Artificial Sequence
  Synthetic
agaauuauguccagcgaau

SEQ ID NO: 17024 - RNA, 19 nt, Artificial Sequence
  Synthetic
caucaagaacauagcacaa

SEQ ID NO: 17025 - RNA, 19 nt, Artificial Sequence
  Synthetic
cuaugacuguagugagaaa

SEQ ID NO: 17026 - RNA, 19 nt, Artificial Sequence
  Synthetic
uuaaaagaccuguggaaaa

SEQ ID NO: 17027 - RNA, 19 nt, Artificial Sequence
  Synthetic
ccaaagaguagcagcccua

SEQ ID NO: 17028 - RNA, 19 nt, Artificial Sequence
  Synthetic
uaguaaaacaagagaggaa

SEQ ID NO: 17029 - RNA, 19 nt, Artificial Sequence
  Synthetic
aggaaaucauggaggggaa

SEQ ID NO: 17030 - RNA, 19 nt, Artificial Sequence
  Synthetic
gaggaagaauucagcccaa

SEQ ID NO: 17031 - RNA, 19 nt, Artificial Sequence
  Synthetic
guaaaacaagagaggaaaa

SEQ ID NO: 17032 - RNA, 19 nt, Artificial Sequence
  Synthetic
uggaagaaggugaguucaa

SEQ ID NO: 17033 - RNA, 19 nt, Artificial Sequence
  Synthetic
ccacugaggaugaacgcaa

SEQ ID NO: 17034 - RNA, 19 nt, Artificial Sequence
  Synthetic
acauauuccugguguagaa

SEQ ID NO: 17035 - RNA, 19 nt, Artificial Sequence
  Synthetic
gagaagggugagcaggaaa

SEQ ID NO: 17036 - RNA, 19 nt, Artificial Sequence
  Synthetic
aggcaauggacaaguauuu

SEQ ID NO: 17037 - RNA, 19 nt, Artificial Sequence
  Synthetic
cuggaaaauuuaugggcua

SEQ ID NO: 17038 - RNA, 19 nt, Artificial Sequence
  Synthetic
agaacuggauugagaagau

SEQ ID NO: 17039 - RNA, 19 nt, Artificial Sequence
  Synthetic
cuacuaugcgggagaguuu

SEQ ID NO: 17040 - RNA, 19 nt, Artificial Sequence
  Synthetic
agcuauagcaauuggacaa

SEQ ID NO: 17041 - RNA, 19 nt, Artificial Sequence
  Synthetic
ggaagagucgagagcccaa

SEQ ID NO: 17042 - RNA, 19 nt, Artificial Sequence
  Synthetic
ccgagagguaugacaucaa

SEQ ID NO: 17043 - RNA, 19 nt, Artificial Sequence
  Synthetic
accucaacuuucagggcaa

SEQ ID NO: 17044 - RNA, 19 nt, Artificial Sequence
  Synthetic
caucaaaggcugcgaggug

SEQ ID NO: 17045 - RNA, 19 nt, Artificial Sequence
  Synthetic
cuggagcaccuguggaaga

SEQ ID NO: 17046 - RNA, 19 nt, Artificial Sequence
  Synthetic
uguggaagacacugcgcua

SEQ ID NO: 17047 - RNA, 19 nt, Artificial Sequence
  Synthetic
caguggagcaaguggaaga

SEQ ID NO: 17048 - RNA, 19 nt, Artificial Sequence
  Synthetic
acaaggaggacgugaacuu

SEQ ID NO: 17049 - RNA, 19 nt, Artificial Sequence
  Synthetic
cggagaagauguacgccau

SEQ ID NO: 17050 - RNA, 19 nt, Artificial Sequence
  Synthetic
gagaaaagcugaagaggag

SEQ ID NO: 17051 - RNA, 19 nt, Artificial Sequence
  Synthetic
cgggacaacagcagggaca

SEQ ID NO: 17052 - RNA, 19 nt, Artificial Sequence
  Synthetic
gcaaguggaagaagaggau

SEQ ID NO: 17053 - RNA, 19 nt, Artificial Sequence
  Synthetic
gcucccaguccgagaauga

SEQ ID NO: 17054 - RNA, 19 nt, Artificial Sequence
  Synthetic
uggagcaaguggaagaaga

SEQ ID NO: 17055 - RNA, 19 nt, Artificial Sequence
  Synthetic
acgacaaggaggacgugaa

SEQ ID NO: 17056 - RNA, 19 nt, Artificial Sequence
  Synthetic
gggacacggagaagaugua

SEQ ID NO: 17057 - RNA, 19 nt, Artificial Sequence
  Synthetic
acagagaugucaagccuga

SEQ ID NO: 17058 - RNA, 19 nt, Artificial Sequence
  Synthetic
ggccgguguuugacgacaa

SEQ ID NO: 17059 - RNA, 19 nt, Artificial Sequence
  Synthetic
ccacagagaugucaagccu

SEQ ID NO: 17060 - RNA, 19 nt, Artificial Sequence
  Synthetic
ggaagaagaggaugggcuc

SEQ ID NO: 17061 - RNA, 19 nt, Artificial Sequence
  Synthetic
caacaaaggccgucugcac

SEQ ID NO: 17062 - RNA, 19 nt, Artificial Sequence
  Synthetic
uggcacuggcucuggacua

SEQ ID NO: 17063 - RNA, 19 nt, Artificial Sequence
  Synthetic
agagaaaagcugaagagga

SEQ ID NO: 17064 - RNA, 19 nt, Artificial Sequence
  Synthetic
cgagaaugacuaucuucaa

SEQ ID NO: 17065 - RNA, 19 nt, Artificial Sequence
  Synthetic
ggaagaacagguagaagaa

SEQ ID NO: 17066 - RNA, 19 nt, Artificial Sequence
  Synthetic
agguagaagaaaugcaaua

SEQ ID NO: 17067 - RNA, 19 nt, Artificial Sequence
  Synthetic
aagaacagguagaagaaau

SEQ ID NO: 17068 - RNA, 19 nt, Artificial Sequence
  Synthetic
caacaagacagaaggugaa

SEQ ID NO: 17069 - RNA, 19 nt, Artificial Sequence
  Synthetic
cgaaaugcuuauagagagu

SEQ ID NO: 17070 - RNA, 19 nt, Artificial Sequence
  Synthetic
agacagaaggugaagaaga

SEQ ID NO: 17071 - RNA, 19 nt, Artificial Sequence
  Synthetic
aggaagaacagguagaaga

SEQ ID NO: 17072 - RNA, 19 nt, Artificial Sequence
  Synthetic
cagcaaaaucugaaagcua

SEQ ID NO: 17073 - RNA, 19 nt, Artificial Sequence
  Synthetic
acuaaggacuggaaauauu

SEQ ID NO: 17074 - RNA, 19 nt, Artificial Sequence
  Synthetic
uggcaacagcaaugaauua

SEQ ID NO: 17075 - RNA, 19 nt, Artificial Sequence
  Synthetic
caagacagaaggugaagaa

SEQ ID NO: 17076 - RNA, 19 nt, Artificial Sequence
  Synthetic
gacagaaggugaagaagau

SEQ ID NO: 17077 - RNA, 19 nt, Artificial Sequence
  Synthetic
guguguuacugcuguguua

SEQ ID NO: 17078 - RNA, 19 nt, Artificial Sequence
  Synthetic
gguaauaaauaaggaacca

SEQ ID NO: 17079 - RNA, 19 nt, Artificial Sequence
  Synthetic
ugaaucagguggagaaagu

SEQ ID NO: 17080 - RNA, 19 nt, Artificial Sequence
  Synthetic
ucaacaagacagaagguga

SEQ ID NO: 17081 - RNA, 19 nt, Artificial Sequence
  Synthetic
auacuaaggacuggaaaua

SEQ ID NO: 17082 - RNA, 19 nt, Artificial Sequence
  Synthetic
uagcaaugguugaaaucau

SEQ ID NO: 17083 - RNA, 19 nt, Artificial Sequence
  Synthetic
auagaaaucugaaggucau

SEQ ID NO: 17084 - RNA, 19 nt, Artificial Sequence
  Synthetic
acaagaagguuuccaauca

SEQ ID NO: 17085 - RNA, 19 nt, Artificial Sequence
  Synthetic
gcaaucauguggacaccaa

SEQ ID NO: 17086 - RNA, 19 nt, Artificial Sequence
  Synthetic
gcuccgaccuagaugauga

SEQ ID NO: 17087 - RNA, 19 nt, Artificial Sequence
  Synthetic
guggauauuugguagcaau

SEQ ID NO: 17088 - RNA, 19 nt, Artificial Sequence
  Synthetic
ugaagaagaugcacaacga

SEQ ID NO: 17089 - RNA, 19 nt, Artificial Sequence
  Synthetic
aggugaagaagaugcacaa

SEQ ID NO: 17090 - RNA, 19 nt, Artificial Sequence
  Synthetic
agcaaugacugauguggaa

SEQ ID NO: 17091 - RNA, 19 nt, Artificial Sequence
  Synthetic
gaauuaaagacaagaaggu

SEQ ID NO: 17092 - RNA, 19 nt, Artificial Sequence
  Synthetic
gaagaaaugcaauacauga

SEQ ID NO: 17093 - RNA, 19 nt, Artificial Sequence
  Synthetic
caucaagacuccauugcuu

SEQ ID NO: 17094 - RNA, 19 nt, Artificial Sequence
  Synthetic
cgaccuagaugaugauucu

SEQ ID NO: 17095 - RNA, 19 nt, Artificial Sequence
  Synthetic
gcaaaucauucuugguaaa

SEQ ID NO: 17096 - RNA, 19 nt, Artificial Sequence
  Synthetic
gaaagauaggagaaagaaa

SEQ ID NO: 17097 - RNA, 19 nt, Artificial Sequence
  Synthetic
ggaagaugcaaaagagaaa

SEQ ID NO: 17098 - RNA, 19 nt, Artificial Sequence
  Synthetic
acacaagaccaauuggaaa

SEQ ID NO: 17099 - RNA, 19 nt, Artificial Sequence
  Synthetic
uaucaagagugcugaauau

SEQ ID NO: 17100 - RNA, 19 nt, Artificial Sequence
  Synthetic
ccgugaaggaagaugcaaa

SEQ ID NO: 17101 - RNA, 19 nt, Artificial Sequence
  Synthetic
caagauaacucugggagaa

SEQ ID NO: 17102 - RNA, 19 nt, Artificial Sequence
  Synthetic
cagaaacaucuuuaggaua

SEQ ID NO: 17103 - RNA, 19 nt, Artificial Sequence
  Synthetic
gagucaugcuauacugaaa

SEQ ID NO: 17104 - RNA, 19 nt, Artificial Sequence
  Synthetic
gauaggagaaagaaaguuu

SEQ ID NO: 17105 - RNA, 19 nt, Artificial Sequence
  Synthetic
cggcuggagucaugcuaua

SEQ ID NO: 17106 - RNA, 19 nt, Artificial Sequence
  Synthetic
ggcaaaucauucuugguaa

SEQ ID NO: 17107 - RNA, 19 nt, Artificial Sequence
  Synthetic
gagaaagaacaauagucaa

SEQ ID NO: 17108 - RNA, 19 nt, Artificial Sequence
  Synthetic
ggaaaagccucaaaaugaa

SEQ ID NO: 17109 - RNA, 19 nt, Artificial Sequence
  Synthetic
ggagaaagaaaguuuauca

SEQ ID NO: 17110 - RNA, 19 nt, Artificial Sequence
  Synthetic
augaugauguccaagguaa

SEQ ID NO: 17111 - RNA, 19 nt, Artificial Sequence
  Synthetic
ggauagaguguguuuguuu

SEQ ID NO: 17112 - RNA, 19 nt, Artificial Sequence
  Synthetic
guugaaagacuuagugguu

SEQ ID NO: 17113 - RNA, 19 nt, Artificial Sequence
  Synthetic
cugaauaucugcauguuga

SEQ ID NO: 17114 - RNA, 19 nt, Artificial Sequence
  Synthetic
ugaaagacuuagugguucu

SEQ ID NO: 17115 - RNA, 19 nt, Artificial Sequence
  Synthetic
ugagaaagaacaauaguca

SEQ ID NO: 17116 - RNA, 19 nt, Artificial Sequence
  Synthetic
gccagggacaggaaagaua

SEQ ID NO: 17117 - RNA, 19 nt, Artificial Sequence
  Synthetic
cacaagaccaauuggaaaa

SEQ ID NO: 17118 - RNA, 19 nt, Artificial Sequence
  Synthetic
gggcaaaucauucuuggua

SEQ ID NO: 17119 - RNA, 19 nt, Artificial Sequence
  Synthetic
gcacugaaggaaaagguua

SEQ ID NO: 17120 - RNA, 19 nt, Artificial Sequence
  Synthetic
uggaaaagccucaaaauga

SEQ ID NO: 17121 - RNA, 19 nt, Artificial Sequence
  Synthetic
acagaaacaucuuuaggau

SEQ ID NO: 17122 - RNA, 19 nt, Artificial Sequence
  Synthetic
cuucauggaauuuguagaa

SEQ ID NO: 17123 - RNA, 19 nt, Artificial Sequence
  Synthetic
cuaucaagagugcugaaua

SEQ ID NO: 17124 - RNA, 19 nt, Artificial Sequence
  Synthetic
gaacaauagucaaaacuca

SEQ ID NO: 17125 - RNA, 19 nt, Artificial Sequence
  Synthetic
gcaucaagaucaucagcaa

SEQ ID NO: 17126 - RNA, 19 nt, Artificial Sequence
  Synthetic
gugaagagguuugaugaaa

SEQ ID NO: 17127 - RNA, 19 nt, Artificial Sequence
  Synthetic
ugaagagguuugaugaaau

SEQ ID NO: 17128 - RNA, 19 nt, Artificial Sequence
  Synthetic
ccugaaagucuguguccaa

SEQ ID NO: 17129 - RNA, 19 nt, Artificial Sequence
  Synthetic
cggaaguggagcuggugaa

SEQ ID NO: 17130 - RNA, 19 nt, Artificial Sequence
  Synthetic
ccaaagagacuuagcaaag

SEQ ID NO: 17131 - RNA, 19 nt, Artificial Sequence
  Synthetic
gcaugucgauccaggagaa

SEQ ID NO: 17132 - RNA, 19 nt, Artificial Sequence
  Synthetic
acgaaggcgugaagagguu

SEQ ID NO: 17133 - RNA, 19 nt, Artificial Sequence
  Synthetic
caucaagaucaucagcaaa

SEQ ID NO: 17134 - RNA, 19 nt, Artificial Sequence
  Synthetic
ccuaagaugccuugagucu

SEQ ID NO: 17135 - RNA, 19 nt, Artificial Sequence
  Synthetic
aggcagaggccgcagugua

SEQ ID NO: 17136 - RNA, 19 nt, Artificial Sequence
  Synthetic
ggaugaacauugcgcgacu

SEQ ID NO: 17137 - RNA, 19 nt, Artificial Sequence
  Synthetic
ggaccuaggcaucgagauc

SEQ ID NO: 17138 - RNA, 19 nt, Artificial Sequence
  Synthetic
cuguggaagcggugaagau

SEQ ID NO: 17139 - RNA, 19 nt, Artificial Sequence
  Synthetic
gggcaagccuguugucugu

SEQ ID NO: 17140 - RNA, 19 nt, Artificial Sequence
  Synthetic
gaaaaucgguccagaggga

SEQ ID NO: 17141 - RNA, 19 nt, Artificial Sequence
  Synthetic
gccucaaggagaugaucaa

SEQ ID NO: 17142 - RNA, 19 nt, Artificial Sequence
  Synthetic
cauugaaaguggaaagcuc

SEQ ID NO: 17143 - RNA, 19 nt, Artificial Sequence
  Synthetic
ggacacggcaucaagauca

SEQ ID NO: 17144 - RNA, 19 nt, Artificial Sequence
  Synthetic
gcgugaagagguuugauga

SEQ ID NO: 17145 - RNA, 19 nt, Artificial Sequence
  Synthetic
cagagggacuggugaccca

SEQ ID NO: 17146 - RNA, 19 nt, Artificial Sequence
  Synthetic
cccuagugguccagaaaau

SEQ ID NO: 17147 - RNA, 19 nt, Artificial Sequence
  Synthetic
agacuauaacugucaucua

SEQ ID NO: 17148 - RNA, 19 nt, Artificial Sequence
  Synthetic
gaaagucuguguccaauua

SEQ ID NO: 17149 - RNA, 19 nt, Artificial Sequence
  Synthetic
caacgagggcagagacaag

SEQ ID NO: 17150 - RNA, 19 nt, Artificial Sequence
  Synthetic
gaagagguuugaugaaauc

SEQ ID NO: 17151 - RNA, 19 nt, Artificial Sequence
  Synthetic
uggaagcggugaagaugca

SEQ ID NO: 17152 - RNA, 19 nt, Artificial Sequence
  Synthetic
uuggagaccuggugauugu

SEQ ID NO: 17153 - RNA, 19 nt, Artificial Sequence
  Synthetic
guggagagcuuugcagguu

SEQ ID NO: 17154 - RNA, 19 nt, Artificial Sequence
  Synthetic
ggaaagaacaucaagauua

SEQ ID NO: 17155 - RNA, 19 nt, Artificial Sequence
  Synthetic
cugcagagguggagcugaa

SEQ ID NO: 17156 - RNA, 19 nt, Artificial Sequence
  Synthetic
cguugaaggagaugauuaa

SEQ ID NO: 17157 - RNA, 19 nt, Artificial Sequence
  Synthetic
gauuaagucuggaaugaau

SEQ ID NO: 17158 - RNA, 19 nt, Artificial Sequence
  Synthetic
guggagacguugaaggaga

SEQ ID NO: 17159 - RNA, 19 nt, Artificial Sequence
  Synthetic
caucaagauuaucagcaaa

SEQ ID NO: 17160 - RNA, 19 nt, Artificial Sequence
  Synthetic
gggaaagaacaucaagauu

SEQ ID NO: 17161 - RNA, 19 nt, Artificial Sequence
  Synthetic
gagagaagggaaagaacau

SEQ ID NO: 17162 - RNA, 19 nt, Artificial Sequence
  Synthetic
ggagagaagggaaagaaca

SEQ ID NO: 17163 - RNA, 19 nt, Artificial Sequence
  Synthetic
acacauuccuggagcacau

SEQ ID NO: 17164 - RNA, 19 nt, Artificial Sequence
  Synthetic
acaucaagauuaucagcaa

SEQ ID NO: 17165 - RNA, 19 nt, Artificial Sequence
  Synthetic
gaucaacgccucacugaaa

SEQ ID NO: 17166 - RNA, 19 nt, Artificial Sequence
  Synthetic
gcaagaucuacguggauga

SEQ ID NO: 17167 - RNA, 19 nt, Artificial Sequence
  Synthetic
acguugaaggagaugauua

SEQ ID NO: 17168 - RNA, 19 nt, Artificial Sequence
  Synthetic
caagaaacagccagcaaga

SEQ ID NO: 17169 - RNA, 19 nt, Artificial Sequence
  Synthetic
ccauaaucguccucaccaa

SEQ ID NO: 17170 - RNA, 19 nt, Artificial Sequence
  Synthetic
gcaagaagggugugaaccu

SEQ ID NO: 17171 - RNA, 19 nt, Artificial Sequence
  Synthetic
ggcaagagggugacagcuu

SEQ ID NO: 17172 - RNA, 19 nt, Artificial Sequence
  Synthetic
ccaucuaccacuugcaauu

SEQ ID NO: 17173 - RNA, 19 nt, Artificial Sequence
  Synthetic
gcagaaaggugccgacuuc

SEQ ID NO: 17174 - RNA, 19 nt, Artificial Sequence
  Synthetic
gcucagaagaugaugauug

SEQ ID NO: 17175 - RNA, 19 nt, Artificial Sequence
  Synthetic
cagcaacgcuuguagaacu

SEQ ID NO: 17176 - RNA, 19 nt, Artificial Sequence
  Synthetic
gagaagggaaagaacauca

SEQ ID NO: 17177 - RNA, 19 nt, Artificial Sequence
  Synthetic
gggugaacuuugccaugaa

SEQ ID NO: 17178 - RNA, 19 nt, Artificial Sequence
  Synthetic
cagagguggagcugaagaa

SEQ ID NO: 17179 - RNA, 19 nt, Artificial Sequence
  Synthetic
aaacagccagcaagaguua

SEQ ID NO: 17180 - RNA, 19 nt, Artificial Sequence
  Synthetic
guucggagguuugaugaaa

SEQ ID NO: 17181 - RNA, 19 nt, Artificial Sequence
  Synthetic
cuggagagcaugaucaaga

SEQ ID NO: 17182 - RNA, 19 nt, Artificial Sequence
  Synthetic
cuacguggaugaugggcuu

SEQ ID NO: 17183 - RNA, 19 nt, Artificial Sequence
  Synthetic
caugcugucuggagaaaca

SEQ ID NO: 17184 - RNA, 19 nt, Artificial Sequence
  Synthetic
gggaggaacuuaccgucua

SEQ ID NO: 17185 - RNA, 19 nt, Artificial Sequence
  Synthetic
gugagguccaggagggaga

SEQ ID NO: 17186 - RNA, 19 nt, Artificial Sequence
  Synthetic
gguaaagcguuccauguca

SEQ ID NO: 17187 - RNA, 19 nt, Artificial Sequence
  Synthetic
ggaaagguggccagcagau

SEQ ID NO: 17188 - RNA, 19 nt, Artificial Sequence
  Synthetic
ggacagcagcggauguguu

SEQ ID NO: 17189 - RNA, 19 nt, Artificial Sequence
  Synthetic
acggagaggucuucaaggu

SEQ ID NO: 17190 - RNA, 19 nt, Artificial Sequence
  Synthetic
cagcggauguguucagucu

SEQ ID NO: 17191 - RNA, 19 nt, Artificial Sequence
  Synthetic
gcccuggaccuaagugaca

SEQ ID NO: 17192 - RNA, 19 nt, Artificial Sequence
  Synthetic
gcugcaagcugggugacuu

SEQ ID NO: 17193 - RNA, 19 nt, Artificial Sequence
  Synthetic
gcgguaaagcguuccaugu

SEQ ID NO: 17194 - RNA, 19 nt, Artificial Sequence
  Synthetic
acagcagccucuccagcaa

SEQ ID NO: 17195 - RNA, 19 nt, Artificial Sequence
  Synthetic
ggaccuaagugacaucaac

SEQ ID NO: 17196 - RNA, 19 nt, Artificial Sequence
  Synthetic
guucuguccuugucaugau

SEQ ID NO: 17197 - RNA, 19 nt, Artificial Sequence
  Synthetic
ccacgcagaaccuggauuc

SEQ ID NO: 17198 - RNA, 19 nt, Artificial Sequence
  Synthetic
cgagcugcguucuguccuu

SEQ ID NO: 17199 - RNA, 19 nt, Artificial Sequence
  Synthetic
ggaggaacuuaccgucuac

SEQ ID NO: 17200 - RNA, 19 nt, Artificial Sequence
  Synthetic
cuacuuccgccacgcagaa

SEQ ID NO: 17201 - RNA, 19 nt, Artificial Sequence
  Synthetic
uaagugacaucaacucaga

SEQ ID NO: 17202 - RNA, 19 nt, Artificial Sequence
  Synthetic
gccuggccgugucuaauaa

SEQ ID NO: 17203 - RNA, 19 nt, Artificial Sequence
  Synthetic
ugucaagccugccaacauc

SEQ ID NO: 17204 - RNA, 19 nt, Artificial Sequence
  Synthetic
ccaggccagucaugcuaga

SEQ ID NO: 17205 - RNA, 19 nt, Artificial Sequence
  Synthetic
ccuggauucucccucaaga

SEQ ID NO: 17206 - RNA, 19 nt, Artificial Sequence
  Synthetic
gggaugcccuggaccuaag

SEQ ID NO: 17207 - RNA, 19 nt, Artificial Sequence
  Synthetic
gaaccuccucagcauguuu

SEQ ID NO: 17208 - RNA, 19 nt, Artificial Sequence
  Synthetic
gcucaccacccugcaguuu

SEQ ID NO: 17209 - RNA, 19 nt, Artificial Sequence
  Synthetic
aaagguggccagcagaugu

SEQ ID NO: 17210 - RNA, 19 nt, Artificial Sequence
  Synthetic
gauucugccucugcacuuu

SEQ ID NO: 17211 - RNA, 19 nt, Artificial Sequence
  Synthetic
ugccuggccgugucuaaua

SEQ ID NO: 17212 - RNA, 19 nt, Artificial Sequence
  Synthetic
gaaccuccucagccuguuu

SEQ ID NO: 17213 - RNA, 19 nt, Artificial Sequence
  Synthetic
gaaagguggccagcagaug

SEQ ID NO: 17214 - RNA, 19 nt, Artificial Sequence
  Synthetic
agaaagagcugaagaucaa

SEQ ID NO: 17215 - RNA, 19 nt, Artificial Sequence
  Synthetic
ccaagaacguggugaaacu

SEQ ID NO: 17216 - RNA, 19 nt, Artificial Sequence
  Synthetic
ccaucaaagcacugaagaa

SEQ ID NO: 17217 - RNA, 19 nt, Artificial Sequence
  Synthetic
gcgccaagaacguggugaa

SEQ ID NO: 17218 - RNA, 19 nt, Artificial Sequence
  Synthetic
cagaaagagcugaagauca

SEQ ID NO: 17219 - RNA, 19 nt, Artificial Sequence
  Synthetic
acgagaugcugguggguga

SEQ ID NO: 17220 - RNA, 19 nt, Artificial Sequence
  Synthetic
agaucaagguccagccauu

SEQ ID NO: 17221 - RNA, 19 nt, Artificial Sequence
  Synthetic
guucaaggggacagggaaa

SEQ ID NO: 17222 - RNA, 19 nt, Artificial Sequence
  Synthetic
ggaaauacuacgccaucaa

SEQ ID NO: 17223 - RNA, 19 nt, Artificial Sequence
  Synthetic
gggacgagauagagagccu

SEQ ID NO: 17224 - RNA, 19 nt, Artificial Sequence
  Synthetic
ggaccaaggccaagcacca

SEQ ID NO: 17225 - RNA, 19 nt, Artificial Sequence
  Synthetic
auguggagcugaaggugaa

SEQ ID NO: 17226 - RNA, 19 nt, Artificial Sequence
  Synthetic
ggagaacacaggaccgcaa

SEQ ID NO: 17227 - RNA, 19 nt, Artificial Sequence
  Synthetic
gggaccugaaguuggauaa

SEQ ID NO: 17228 - RNA, 19 nt, Artificial Sequence
  Synthetic
ccgaggagaucaaggucca

SEQ ID NO: 17229 - RNA, 19 nt, Artificial Sequence
  Synthetic
acgagaagaagaucauuua

SEQ ID NO: 17230 - RNA, 19 nt, Artificial Sequence
  Synthetic
ccugaagaucgcagacuuu

SEQ ID NO: 17231 - RNA, 19 nt, Artificial Sequence
  Synthetic
gagaagaagaucauuuaca

SEQ ID NO: 17232 - RNA, 19 nt, Artificial Sequence
  Synthetic
cagaggaagagguguuuga

SEQ ID NO: 17233 - RNA, 19 nt, Artificial Sequence
  Synthetic
ucaaagcacugaagaagca

SEQ ID NO: 17234 - RNA, 19 nt, Artificial Sequence
  Synthetic
gcucagccgggacgagaua

SEQ ID NO: 17235 - RNA, 19 nt, Artificial Sequence
  Synthetic
ccaguaauuuccugcccaa

SEQ ID NO: 17236 - RNA, 19 nt, Artificial Sequence
  Synthetic
aggaugagaaggaggugau

SEQ ID NO: 17237 - RNA, 19 nt, Artificial Sequence
  Synthetic
cagagugacccgagaguug

SEQ ID NO: 17238 - RNA, 19 nt, Artificial Sequence
  Synthetic
cugcuuaguagccggagaa

SEQ ID NO: 17239 - RNA, 19 nt, Artificial Sequence
  Synthetic
cgccaagaacguggugaaa

SEQ ID NO: 17240 - RNA, 19 nt, Artificial Sequence
  Synthetic
gcaaggaagggaucggcuu

SEQ ID NO: 17241 - RNA, 19 nt, Artificial Sequence
  Synthetic
gcugagaacaugacccaca

SEQ ID NO: 17242 - RNA, 19 nt, Artificial Sequence
  Synthetic
gaggcgagcuugccaguga

SEQ ID NO: 17243 - RNA, 19 nt, Artificial Sequence
  Synthetic
acuuugugucagagcgauu

SEQ ID NO: 17244 - RNA, 19 nt, Artificial Sequence
  Synthetic
gagaagauguccauggaaa

SEQ ID NO: 17245 - RNA, 19 nt, Artificial Sequence
  Synthetic
ggaucaagaagaaugaaua

SEQ ID NO: 17246 - RNA, 19 nt, Artificial Sequence
  Synthetic
augaagaucuggaggugaa

SEQ ID NO: 17247 - RNA, 19 nt, Artificial Sequence
  Synthetic
caaccaaagucgaauauga

SEQ ID NO: 17248 - RNA, 19 nt, Artificial Sequence
  Synthetic
ccauaugaauuguacagaa

SEQ ID NO: 17249 - RNA, 19 nt, Artificial Sequence
  Synthetic
ucaauaaaggcuuggagaa

SEQ ID NO: 17250 - RNA, 19 nt, Artificial Sequence
  Synthetic
gcaagaaagggcacaguuu

SEQ ID NO: 17251 - RNA, 19 nt, Artificial Sequence
  Synthetic
gcaccgaaaccgaguuauu

SEQ ID NO: 17252 - RNA, 19 nt, Artificial Sequence
  Synthetic
ggaggaaagcccugacuga

SEQ ID NO: 17253 - RNA, 19 nt, Artificial Sequence
  Synthetic
ugaccuacaucgacgagaa

SEQ ID NO: 17254 - RNA, 19 nt, Artificial Sequence
  Synthetic
gaagauguccauggaaaua

SEQ ID NO: 17255 - RNA, 19 nt, Artificial Sequence
  Synthetic
gccaguaccugcaccgaaa

SEQ ID NO: 17256 - RNA, 19 nt, Artificial Sequence
  Synthetic
gcacauaccgccugagucu

SEQ ID NO: 17257 - RNA, 19 nt, Artificial Sequence
  Synthetic
ccuuaaauauuuccgcaau

SEQ ID NO: 17258 - RNA, 19 nt, Artificial Sequence
  Synthetic
ccucacaguccucaauaaa

SEQ ID NO: 17259 - RNA, 19 nt, Artificial Sequence
  Synthetic
guucuuuacuucuggcuau

SEQ ID NO: 17260 - RNA, 19 nt, Artificial Sequence
  Synthetic
caauaaaggcuuggagaac

SEQ ID NO: 17261 - RNA, 19 nt, Artificial Sequence
  Synthetic
gcaagaggaggcugaggau

SEQ ID NO: 17262 - RNA, 19 nt, Artificial Sequence
  Synthetic
uggcaaccaaagucgaaua

SEQ ID NO: 17263 - RNA, 19 nt, Artificial Sequence
  Synthetic
uuugagacuucuugccuaa

SEQ ID NO: 17264 - RNA, 19 nt, Artificial Sequence
  Synthetic
agaagauguccauggaaau

SEQ ID NO: 17265 - RNA, 19 nt, Artificial Sequence
  Synthetic
auaccuuguuagugggcaa

SEQ ID NO: 17266 - RNA, 19 nt, Artificial Sequence
  Synthetic
cgaaagagaucccggaggu

SEQ ID NO: 17267 - RNA, 19 nt, Artificial Sequence
  Synthetic
gcgcgaaggugaugagcuc

SEQ ID NO: 17268 - RNA, 19 nt, Artificial Sequence
  Synthetic
cgauacuaccuacggcaaa

SEQ ID NO: 17269 - RNA, 19 nt, Artificial Sequence
  Synthetic
ucagcaaguggguggacua

SEQ ID NO: 17270 - RNA, 19 nt, Artificial Sequence
  Synthetic
ggguggacuauucggacaa

SEQ ID NO: 17271 - RNA, 19 nt, Artificial Sequence
  Synthetic
cggaucaagaagaaugaau

SEQ ID NO: 17272 - RNA, 19 nt, Artificial Sequence
  Synthetic
cugcacaagaggaggaaag

SEQ ID NO: 17273 - RNA, 19 nt, Artificial Sequence
  Synthetic
aagaagacccuguguggga

SEQ ID NO: 17274 - RNA, 19 nt, Artificial Sequence
  Synthetic
ggggcaaagugcugggaaa

SEQ ID NO: 17275 - RNA, 19 nt, Artificial Sequence
  Synthetic
cuaaagaagaugaagacau

SEQ ID NO: 17276 - RNA, 19 nt, Artificial Sequence
  Synthetic
ggucaauggcucauauuuu

SEQ ID NO: 17277 - RNA, 19 nt, Artificial Sequence
  Synthetic
gagcagaggaagaagacca

SEQ ID NO: 17278 - RNA, 19 nt, Artificial Sequence
  Synthetic
uggagauggauuugaagaa

SEQ ID NO: 17279 - RNA, 19 nt, Artificial Sequence
  Synthetic
ccucaugaaggguggagau

SEQ ID NO: 17280 - RNA, 19 nt, Artificial Sequence
  Synthetic
agauugagcugcaccgaga

SEQ ID NO: 17281 - RNA, 19 nt, Artificial Sequence
  Synthetic
ccgaaaucguagugcuugu

SEQ ID NO: 17282 - RNA, 19 nt, Artificial Sequence
  Synthetic
gggaccucaaguugggaaa

SEQ ID NO: 17283 - RNA, 19 nt, Artificial Sequence
  Synthetic
ccaguguggaagagguaga

SEQ ID NO: 17284 - RNA, 19 nt, Artificial Sequence
  Synthetic
gcccaguguggaagaggua

SEQ ID NO: 17285 - RNA, 19 nt, Artificial Sequence
  Synthetic
gagaaauuguauagccuuc

SEQ ID NO: 17286 - RNA, 19 nt, Artificial Sequence
  Synthetic
gcuugaaagaggagauaaa

SEQ ID NO: 17287 - RNA, 19 nt, Artificial Sequence
  Synthetic
acaacuagguauggagaaa

SEQ ID NO: 17288 - RNA, 19 nt, Artificial Sequence
  Synthetic
gugaaaaugaagagaggua

SEQ ID NO: 17289 - RNA, 19 nt, Artificial Sequence
  Synthetic
ucacaguaaaccugagaua

SEQ ID NO: 17290 - RNA, 19 nt, Artificial Sequence
  Synthetic
aauucaagaugcagaagaa

SEQ ID NO: 17291 - RNA, 19 nt, Artificial Sequence
  Synthetic
acaguaaaccugagauaau

SEQ ID NO: 17292 - RNA, 19 nt, Artificial Sequence
  Synthetic
cccaauaaucauaggaaga

SEQ ID NO: 17293 - RNA, 19 nt, Artificial Sequence
  Synthetic
gguuacaaaugaaggacuu

SEQ ID NO: 17294 - RNA, 19 nt, Artificial Sequence
  Synthetic
cauaauuucagaagaggaa

SEQ ID NO: 17295 - RNA, 19 nt, Artificial Sequence
  Synthetic
caggaaugguacagagagu

SEQ ID NO: 17296 - RNA, 19 nt, Artificial Sequence
  Synthetic
uugaaagaccugauaacaa

SEQ ID NO: 17297 - RNA, 19 nt, Artificial Sequence
  Synthetic
auaaaguaguauuggcaga

SEQ ID NO: 17298 - RNA, 19 nt, Artificial Sequence
  Synthetic
ccaaauggugguagagguu

SEQ ID NO: 17299 - RNA, 19 nt, Artificial Sequence
  Synthetic
auaagaaagccauguacaa

SEQ ID NO: 17300 - RNA, 19 nt, Artificial Sequence
  Synthetic
ugaaaaugccacaugaaaa

SEQ ID NO: 17301 - RNA, 19 nt, Artificial Sequence
  Synthetic
uggaaaucugcuugguaaa

SEQ ID NO: 17302 - RNA, 19 nt, Artificial Sequence
  Synthetic
cauuaaggaucgaaguaaa

SEQ ID NO: 17303 - RNA, 19 nt, Artificial Sequence
  Synthetic
ggaugaagccucaggugua

SEQ ID NO: 17304 - RNA, 19 nt, Artificial Sequence
  Synthetic
ugacugagcuggaagacaa

SEQ ID NO: 17305 - RNA, 19 nt, Artificial Sequence
  Synthetic
cuaaagaagcugucaagaa

SEQ ID NO: 17306 - RNA, 19 nt, Artificial Sequence
  Synthetic
gaagaaggcagcugagcaa

SEQ ID NO: 17307 - RNA, 19 nt, Artificial Sequence
  Synthetic
gcagggaagaugaaaguua

SEQ ID NO: 17308 - RNA, 19 nt, Artificial Sequence
  Synthetic
uuaaacagucggugggaaa

SEQ ID NO: 17309 - RNA, 19 nt, Artificial Sequence
  Synthetic
cuguuugccuggagggaua

SEQ ID NO: 17310 - RNA, 19 nt, Artificial Sequence
  Synthetic
gaagauaacuugcugggua

SEQ ID NO: 17311 - RNA, 19 nt, Artificial Sequence
  Synthetic
uagaauggcuacagaaaga

SEQ ID NO: 17312 - RNA, 19 nt, Artificial Sequence
  Synthetic
aggcaaaggaggcgugcaa

SEQ ID NO: 17313 - RNA, 19 nt, Artificial Sequence
  Synthetic
ccguaaggcagcagaauau

SEQ ID NO: 17314 - RNA, 19 nt, Artificial Sequence
  Synthetic
agaugaaaguuacggauau

SEQ ID NO: 17315 - RNA, 19 nt, Artificial Sequence
  Synthetic
acaacuggccacagagaua

SEQ ID NO: 17316 - RNA, 19 nt, Artificial Sequence
  Synthetic
gaagagagagcgagcaaca

SEQ ID NO: 17317 - RNA, 19 nt, Artificial Sequence
  Synthetic
cauagaauggcuacagaaa

SEQ ID NO: 17318 - RNA, 19 nt, Artificial Sequence
  Synthetic
ccacagaacagaaacaaga

SEQ ID NO: 17319 - RNA, 19 nt, Artificial Sequence
  Synthetic
gcucaaguuucgagagaag

SEQ ID NO: 17320 - RNA, 19 nt, Artificial Sequence
  Synthetic
aagaagagagagcgagcaa

SEQ ID NO: 17321 - RNA, 19 nt, Artificial Sequence
  Synthetic
acggauauguacugccaaa

SEQ ID NO: 17322 - RNA, 19 nt, Artificial Sequence
  Synthetic
ccgaggagaugcucagcua

SEQ ID NO: 17323 - RNA, 19 nt, Artificial Sequence
  Synthetic
ggacaucugccucaagaaa

SEQ ID NO: 17324 - RNA, 19 nt, Artificial Sequence
  Synthetic
gcucuugaauugucaggaa

SEQ ID NO: 17325 - RNA, 19 nt, Artificial Sequence
  Synthetic
ggaagacaaguuugauuua

SEQ ID NO: 17326 - RNA, 19 nt, Artificial Sequence
  Synthetic
cuaaggaaccucagggcau

SEQ ID NO: 17327 - RNA, 19 nt, Artificial Sequence
  Synthetic
uggaugaacucguggaacu

SEQ ID NO: 17328 - RNA, 19 nt, Artificial Sequence
  Synthetic
ggaucgaaguaaagugacu

SEQ ID NO: 17329 - RNA, 19 nt, Artificial Sequence
  Synthetic
aacagaaacaagagaagaa

SEQ ID NO: 17330 - RNA, 19 nt, Artificial Sequence
  Synthetic
ggagagaguggguauuuua

SEQ ID NO: 17331 - RNA, 19 nt, Artificial Sequence
  Synthetic
aagaugaaaguuacggaua

SEQ ID NO: 17332 - RNA, 19 nt, Artificial Sequence
  Synthetic
ggaagauuguggagggcau

SEQ ID NO: 17333 - RNA, 19 nt, Artificial Sequence
  Synthetic
ccaucuggcuggugaguga

SEQ ID NO: 17334 - RNA, 19 nt, Artificial Sequence
  Synthetic
gagcagacuuggagcugau

SEQ ID NO: 17335 - RNA, 19 nt, Artificial Sequence
  Synthetic
uggaggagcaguuggagaa

SEQ ID NO: 17336 - RNA, 19 nt, Artificial Sequence
  Synthetic
uggagaaccugauagaauu

SEQ ID NO: 17337 - RNA, 19 nt, Artificial Sequence
  Synthetic
gcuugaacuuccagagacu

SEQ ID NO: 17338 - RNA, 19 nt, Artificial Sequence
  Synthetic
uuggagaaccugauagaau

SEQ ID NO: 17339 - RNA, 19 nt, Artificial Sequence
  Synthetic
cagaauguggccuggacaa

SEQ ID NO: 17340 - RNA, 19 nt, Artificial Sequence
  Synthetic
cgagaaccauggaguugaa

SEQ ID NO: 17341 - RNA, 19 nt, Artificial Sequence
  Synthetic
caguguggauacuaauaaa

SEQ ID NO: 17342 - RNA, 19 nt, Artificial Sequence
  Synthetic
ggaaauccgggaaggacuu

SEQ ID NO: 17343 - RNA, 19 nt, Artificial Sequence
  Synthetic
ggagaaccugauagaauuu

SEQ ID NO: 17344 - RNA, 19 nt, Artificial Sequence
  Synthetic
aggagaaacgccaggcuga

SEQ ID NO: 17345 - RNA, 19 nt, Artificial Sequence
  Synthetic
gguggacgaugcugaguca

SEQ ID NO: 17346 - RNA, 19 nt, Artificial Sequence
  Synthetic
ggugagugacacacggaga

SEQ ID NO: 17347 - RNA, 19 nt, Artificial Sequence
  Synthetic
caucgagaaccauggaguu

SEQ ID NO: 17348 - RNA, 19 nt, Artificial Sequence
  Synthetic
ccaguguggauacuaauaa

SEQ ID NO: 17349 - RNA, 19 nt, Artificial Sequence
  Synthetic
gggcuggacuguucuaagu

SEQ ID NO: 17350 - RNA, 19 nt, Artificial Sequence
  Synthetic
gaaccauggaguugaacag

SEQ ID NO: 17351 - RNA, 19 nt, Artificial Sequence
  Synthetic
ggauacuaauaaaccucuu

SEQ ID NO: 17352 - RNA, 19 nt, Artificial Sequence
  Synthetic
gcagacgguccgcguugua

SEQ ID NO: 17353 - RNA, 19 nt, Artificial Sequence
  Synthetic
acuuggagcugaugucugu

SEQ ID NO: 17354 - RNA, 19 nt, Artificial Sequence
  Synthetic
gcaguuggagaaccugaua

SEQ ID NO: 17355 - RNA, 19 nt, Artificial Sequence
  Synthetic
gcuggacuguucuaaguga

SEQ ID NO: 17356 - RNA, 19 nt, Artificial Sequence
  Synthetic
aauguggccuggacaacuu

SEQ ID NO: 17357 - RNA, 19 nt, Artificial Sequence
  Synthetic
ggagcacacucucaaaaca

SEQ ID NO: 17358 - RNA, 19 nt, Artificial Sequence
  Synthetic
ggcaaaggagggugucuug

SEQ ID NO: 17359 - RNA, 19 nt, Artificial Sequence
  Synthetic
uuuauccgcuccagacuuu

SEQ ID NO: 17360 - RNA, 19 nt, Artificial Sequence
  Synthetic
ggacuguucuaagugaguu

SEQ ID NO: 17361 - RNA, 19 nt, Artificial Sequence
  Synthetic
ggcgaaacccugccauauc

SEQ ID NO: 17362 - RNA, 19 nt, Artificial Sequence
  Synthetic
ggacaguggcagugaaaca

SEQ ID NO: 17363 - RNA, 19 nt, Artificial Sequence
  Synthetic
gcuacaagcuggugaucuu

SEQ ID NO: 17364 - RNA, 19 nt, Artificial Sequence
  Synthetic
ccgaggaguucaaggccaa

SEQ ID NO: 17365 - RNA, 19 nt, Artificial Sequence
  Synthetic
gugaaacagcugggaguua

SEQ ID NO: 17366 - RNA, 19 nt, Artificial Sequence
  Synthetic
ccagaaucccagccagaua

SEQ ID NO: 17367 - RNA, 19 nt, Artificial Sequence
  Synthetic
cccaagaugagaagagaga

SEQ ID NO: 17368 - RNA, 19 nt, Artificial Sequence
  Synthetic
aggccaagguggaggcugu

SEQ ID NO: 17369 - RNA, 19 nt, Artificial Sequence
  Synthetic
ccggauauguccacgugaa

SEQ ID NO: 17370 - RNA, 19 nt, Artificial Sequence
  Synthetic
gcugggagaacuuggagaa

SEQ ID NO: 17371 - RNA, 19 nt, Artificial Sequence
  Synthetic
gggcaagguggcuggcuuu

SEQ ID NO: 17372 - RNA, 19 nt, Artificial Sequence
  Synthetic
caagaugagaagagagaug

SEQ ID NO: 17373 - RNA, 19 nt, Artificial Sequence
  Synthetic
cggaagugcuccagaacuc

SEQ ID NO: 17374 - RNA, 19 nt, Artificial Sequence
  Synthetic
ugaaacagcugggaguuaa

SEQ ID NO: 17375 - RNA, 19 nt, Artificial Sequence
  Synthetic
gggcggaagaagaaagacu

SEQ ID NO: 17376 - RNA, 19 nt, Artificial Sequence
  Synthetic
augcugagcugccgaagaa

SEQ ID NO: 17377 - RNA, 19 nt, Artificial Sequence
  Synthetic
gaagagagaugcugagcug

SEQ ID NO: 17378 - RNA, 19 nt, Artificial Sequence
  Synthetic
acagcaucuuugugggaga

SEQ ID NO: 17379 - RNA, 19 nt, Artificial Sequence
  Synthetic
aagcguaugcggaagucaa

SEQ ID NO: 17380 - RNA, 19 nt, Artificial Sequence
  Synthetic
ucaccaaccagaugagcau

SEQ ID NO: 17381 - RNA, 19 nt, Artificial Sequence
  Synthetic
uggaggcugugguggagaa

SEQ ID NO: 17382 - RNA, 19 nt, Artificial Sequence
  Synthetic
acacacuguauuuggucaa

SEQ ID NO: 17383 - RNA, 19 nt, Artificial Sequence
  Synthetic
acgcaggcuuguaccggaa

SEQ ID NO: 17384 - RNA, 19 nt, Artificial Sequence
  Synthetic
aaguggagcuggucgcaga

SEQ ID NO: 17385 - RNA, 19 nt, Artificial Sequence
  Synthetic
ugguugucgcagugggauu

SEQ ID NO: 17386 - RNA, 19 nt, Artificial Sequence
  Synthetic
uggagaaguugcuaguguu

SEQ ID NO: 17387 - RNA, 19 nt, Artificial Sequence
  Synthetic
ggaaacgggucgccaucga

SEQ ID NO: 17388 - RNA, 19 nt, Artificial Sequence
  Synthetic
caaccgguuucgagagaug

SEQ ID NO: 17389 - RNA, 19 nt, Artificial Sequence
  Synthetic
gaccggaagugcuccagaa

SEQ ID NO: 17390 - RNA, 19 nt, Artificial Sequence
  Synthetic
ggagaaguugcuaguguuc

SEQ ID NO: 17391 - RNA, 19 nt, Artificial Sequence
  Synthetic
uuggagaaguugcuagugu

SEQ ID NO: 17392 - RNA, 19 nt, Artificial Sequence
  Synthetic
cuaaagaaauccugacaaa

SEQ ID NO: 17393 - RNA, 19 nt, Artificial Sequence
  Synthetic
guuuagaauugguggcaaa

SEQ ID NO: 17394 - RNA, 19 nt, Artificial Sequence
  Synthetic
cagauuaacuucaggauuu

SEQ ID NO: 17395 - RNA, 19 nt, Artificial Sequence
  Synthetic
ggaaaugggaagagcaaca

SEQ ID NO: 17396 - RNA, 19 nt, Artificial Sequence
  Synthetic
cgacauuguuggucaagaa

SEQ ID NO: 17397 - RNA, 19 nt, Artificial Sequence
  Synthetic
gcgagaaggcuaaagaaau

SEQ ID NO: 17398 - RNA, 19 nt, Artificial Sequence
  Synthetic
agcuagugauggagggaua

SEQ ID NO: 17399 - RNA, 19 nt, Artificial Sequence
  Synthetic
gcaaaucaccagauacaaa

SEQ ID NO: 17400 - RNA, 19 nt, Artificial Sequence
  Synthetic
gcaagauauuucugagaca

SEQ ID NO: 17401 - RNA, 19 nt, Artificial Sequence
  Synthetic
agauaaggauagcagcaaa

SEQ ID NO: 17402 - RNA, 19 nt, Artificial Sequence
  Synthetic
cgagaaggcuaaagaaauc

SEQ ID NO: 17403 - RNA, 19 nt, Artificial Sequence
  Synthetic
ggauauaacuggugccaug

SEQ ID NO: 17404 - RNA, 19 nt, Artificial Sequence
  Synthetic
gggcaagacuggugcuguu

SEQ ID NO: 17405 - RNA, 19 nt, Artificial Sequence
  Synthetic
cugagaaggucaaauuuua

SEQ ID NO: 17406 - RNA, 19 nt, Artificial Sequence
  Synthetic
gggaagagcaacaguaacu

SEQ ID NO: 17407 - RNA, 19 nt, Artificial Sequence
  Synthetic
cugagagacugcagauaau

SEQ ID NO: 17408 - RNA, 19 nt, Artificial Sequence
  Synthetic
ucacacaaguuuaugguuu

SEQ ID NO: 17409 - RNA, 19 nt, Artificial Sequence
  Synthetic
gcuuguagcucuuaagguu

SEQ ID NO: 17410 - RNA, 19 nt, Artificial Sequence
  Synthetic
ggaauguaguaacgauuuu

SEQ ID NO: 17411 - RNA, 19 nt, Artificial Sequence
  Synthetic
ucauggaacuguuuagaau

SEQ ID NO: 17412 - RNA, 19 nt, Artificial Sequence
  Synthetic
uggcaaaucaccagauaca

SEQ ID NO: 17413 - RNA, 19 nt, Artificial Sequence
  Synthetic
gggagauuauguugacaga

SEQ ID NO: 17414 - RNA, 19 nt, Artificial Sequence
  Synthetic
cagcaugacuguagauaag

SEQ ID NO: 17415 - RNA, 19 nt, Artificial Sequence
  Synthetic
cugcagauaauaagaugua

SEQ ID NO: 17416 - RNA, 19 nt, Artificial Sequence
  Synthetic
cuacauaaccucucuggua

SEQ ID NO: 17417 - RNA, 19 nt, Artificial Sequence
  Synthetic
aaucaagggcacuacauaa

SEQ ID NO: 17418 - RNA, 19 nt, Artificial Sequence
  Synthetic
ggaucauaucagagcacuu

SEQ ID NO: 17419 - RNA, 19 nt, Artificial Sequence
  Synthetic
ggaucgagcagcugaacga

SEQ ID NO: 17420 - RNA, 19 nt, Artificial Sequence
  Synthetic
gggcaagauauuucugaga

SEQ ID NO: 17421 - RNA, 19 nt, Artificial Sequence
  Synthetic
gagagacugcagauaauaa

SEQ ID NO: 17422 - RNA, 19 nt, Artificial Sequence
  Synthetic
gcgagaaggcaaaggaaau

SEQ ID NO: 17423 - RNA, 19 nt, Artificial Sequence
  Synthetic
cuuuagaauugguggaaaa

SEQ ID NO: 17424 - RNA, 19 nt, Artificial Sequence
  Synthetic
uuuaguagauggacagaua

SEQ ID NO: 17425 - RNA, 19 nt, Artificial Sequence
  Synthetic
cuauguagacagaggauau

SEQ ID NO: 17426 - RNA, 19 nt, Artificial Sequence
  Synthetic
ggaauuagaugacacuuua

SEQ ID NO: 17427 - RNA, 19 nt, Artificial Sequence
  Synthetic
ucacgaaagccgacaaauu

SEQ ID NO: 17428 - RNA, 19 nt, Artificial Sequence
  Synthetic
uagcauuaaaggugcguua

SEQ ID NO: 17429 - RNA, 19 nt, Artificial Sequence
  Synthetic
cuuuguauguggaaguaua

SEQ ID NO: 17430 - RNA, 19 nt, Artificial Sequence
  Synthetic
agcuuguaauggagggaua

SEQ ID NO: 17431 - RNA, 19 nt, Artificial Sequence
  Synthetic
ccauagacacacuggauca

SEQ ID NO: 17432 - RNA, 19 nt, Artificial Sequence
  Synthetic
cgacaaauuacccaaguau

SEQ ID NO: 17433 - RNA, 19 nt, Artificial Sequence
  Synthetic
cagcuuuaguagauggaca

SEQ ID NO: 17434 - RNA, 19 nt, Artificial Sequence
  Synthetic
guaagcagcugaacgagaa

SEQ ID NO: 17435 - RNA, 19 nt, Artificial Sequence
  Synthetic
gaaaaucaccggauacaaa

SEQ ID NO: 17436 - RNA, 19 nt, Artificial Sequence
  Synthetic
acuuacagcuuuaguagau

SEQ ID NO: 17437 - RNA, 19 nt, Artificial Sequence
  Synthetic
cacgaaagccgacaaauua

SEQ ID NO: 17438 - RNA, 19 nt, Artificial Sequence
  Synthetic
ccgacaaauuacccaagua

SEQ ID NO: 17439 - RNA, 19 nt, Artificial Sequence
  Synthetic
cgagaaggcaaaggaaauu

SEQ ID NO: 17440 - RNA, 19 nt, Artificial Sequence
  Synthetic
guuuaacuggcauggauua

SEQ ID NO: 17441 - RNA, 19 nt, Artificial Sequence
  Synthetic
agacagaggauauuauuca

SEQ ID NO: 17442 - RNA, 19 nt, Artificial Sequence
  Synthetic
ccagaacgcauuacaauau

SEQ ID NO: 17443 - RNA, 19 nt, Artificial Sequence
  Synthetic
gacaaauuacccaaguaua

SEQ ID NO: 17444 - RNA, 19 nt, Artificial Sequence
  Synthetic
ugcgagaaggcaaaggaaa

SEQ ID NO: 17445 - RNA, 19 nt, Artificial Sequence
  Synthetic
gggucgagcagcugaacga

SEQ ID NO: 17446 - RNA, 19 nt, Artificial Sequence
  Synthetic
augaugaaugucugcgaaa

SEQ ID NO: 17447 - RNA, 19 nt, Artificial Sequence
  Synthetic
acuacuuauucauggguga

SEQ ID NO: 17448 - RNA, 19 nt, Artificial Sequence
  Synthetic
guggagaugugcaugguca

SEQ ID NO: 17449 - RNA, 19 nt, Artificial Sequence
  Synthetic
uggaauuagaugacacuuu

SEQ ID NO: 17450 - RNA, 19 nt, Artificial Sequence
  Synthetic
gaugaaugucugcgaaagu

SEQ ID NO: 17451 - RNA, 19 nt, Artificial Sequence
  Synthetic
uggcauggauuaauagagu

SEQ ID NO: 17452 - RNA, 19 nt, Artificial Sequence
  Synthetic
ccagagagaucuugguaga

SEQ ID NO: 17453 - RNA, 19 nt, Artificial Sequence
  Synthetic
ggagaggccuggagaccua

SEQ ID NO: 17454 - RNA, 19 nt, Artificial Sequence
  Synthetic
gcacugagaucuuugacua

SEQ ID NO: 17455 - RNA, 19 nt, Artificial Sequence
  Synthetic
ggacgagcaucuccagaaa

SEQ ID NO: 17456 - RNA, 19 nt, Artificial Sequence
  Synthetic
ucaaagagcuguucagagu

SEQ ID NO: 17457 - RNA, 19 nt, Artificial Sequence
  Synthetic
ccaugaaguuuccaauaau

SEQ ID NO: 17458 - RNA, 19 nt, Artificial Sequence
  Synthetic
ucuugguagaggagagcaa

SEQ ID NO: 17459 - RNA, 19 nt, Artificial Sequence
  Synthetic
gcgacgucccugagaccaa

SEQ ID NO: 17460 - RNA, 19 nt, Artificial Sequence
  Synthetic
acgagcaucuccagaaaga

SEQ ID NO: 17461 - RNA, 19 nt, Artificial Sequence
  Synthetic
gacaaucgaccgaaagcaa

SEQ ID NO: 17462 - RNA, 19 nt, Artificial Sequence
  Synthetic
cggcgacauccauggacaa

SEQ ID NO: 17463 - RNA, 19 nt, Artificial Sequence
  Synthetic
cgcuaaggccagagagauc

SEQ ID NO: 17464 - RNA, 19 nt, Artificial Sequence
  Synthetic
ucaaggagagcgaagucaa

SEQ ID NO: 17465 - RNA, 19 nt, Artificial Sequence
  Synthetic
accaugaaguuuccaauaa

SEQ ID NO: 17466 - RNA, 19 nt, Artificial Sequence
  Synthetic
acgaugagugccugcgcaa

SEQ ID NO: 17467 - RNA, 19 nt, Artificial Sequence
  Synthetic
cugcuaccgcugugggaau

SEQ ID NO: 17468 - RNA, 19 nt, Artificial Sequence
  Synthetic
gucaaggcccugugcgcua

SEQ ID NO: 17469 - RNA, 19 nt, Artificial Sequence
  Synthetic
caaucgaccgaaagcaaga

SEQ ID NO: 17470 - RNA, 19 nt, Artificial Sequence
  Synthetic
cgacauccauggacaauuc

SEQ ID NO: 17471 - RNA, 19 nt, Artificial Sequence
  Synthetic
ccaugagagucgccagauc

SEQ ID NO: 17472 - RNA, 19 nt, Artificial Sequence
  Synthetic
gaugagugccugcgcaagu

SEQ ID NO: 17473 - RNA, 19 nt, Artificial Sequence
  Synthetic
gcugcgagcucaucaagga

SEQ ID NO: 17474 - RNA, 19 nt, Artificial Sequence
  Synthetic
caugagagucgccagauca

SEQ ID NO: 17475 - RNA, 19 nt, Artificial Sequence
  Synthetic
ucuauagcgucgaaacguu

SEQ ID NO: 17476 - RNA, 19 nt, Artificial Sequence
  Synthetic
gcgcuaaggccagagagau

SEQ ID NO: 17477 - RNA, 19 nt, Artificial Sequence
  Synthetic
gaaccaugaaguuuccaau

SEQ ID NO: 17478 - RNA, 19 nt, Artificial Sequence
  Synthetic
ucuauggcuucuacgauga

SEQ ID NO: 17479 - RNA, 19 nt, Artificial Sequence
  Synthetic
aaccaugaaguuuccaaua

SEQ ID NO: 17480 - RNA, 19 nt, Artificial Sequence
  Synthetic
ggccagagagaucuuggua

SEQ ID NO: 17481 - RNA, 19 nt, Artificial Sequence
  Synthetic
gcacuuaagguucgcuauc

SEQ ID NO: 17482 - RNA, 19 nt, Artificial Sequence
  Synthetic
gaggagagcuauuugauua

SEQ ID NO: 17483 - RNA, 19 nt, Artificial Sequence
  Synthetic
gcagaaguauguagagcaa

SEQ ID NO: 17484 - RNA, 19 nt, Artificial Sequence
  Synthetic
acacaugaaugcaaagaua

SEQ ID NO: 17485 - RNA, 19 nt, Artificial Sequence
  Synthetic
agaaguaauuucaggaaga

SEQ ID NO: 17486 - RNA, 19 nt, Artificial Sequence
  Synthetic
caaaaugagucuacaguua

SEQ ID NO: 17487 - RNA, 19 nt, Artificial Sequence
  Synthetic
gcaauaagcaugcauaaua

SEQ ID NO: 17488 - RNA, 19 nt, Artificial Sequence
  Synthetic
gaacuuaucuacuggauuu

SEQ ID NO: 17489 - RNA, 19 nt, Artificial Sequence
  Synthetic
ugaaauuacagaagccaaa

SEQ ID NO: 17490 - RNA, 19 nt, Artificial Sequence
  Synthetic
gauuauugucacaggcaua

SEQ ID NO: 17491 - RNA, 19 nt, Artificial Sequence
  Synthetic
aaucaaagauaucagggaa

SEQ ID NO: 17492 - RNA, 19 nt, Artificial Sequence
  Synthetic
gaauaaugaaugaagccaa

SEQ ID NO: 17493 - RNA, 19 nt, Artificial Sequence
  Synthetic
cauaauagauaacaggaga

SEQ ID NO: 17494 - RNA, 19 nt, Artificial Sequence
  Synthetic
gcaaagugaagguuggcaa

SEQ ID NO: 17495 - RNA, 19 nt, Artificial Sequence
  Synthetic
gggauuggaacaugauuua

SEQ ID NO: 17496 - RNA, 19 nt, Artificial Sequence
  Synthetic
ccguaguauugaugaugaa

SEQ ID NO: 17497 - RNA, 19 nt, Artificial Sequence
  Synthetic
gauugaugaugaagccuua

SEQ ID NO: 17498 - RNA, 19 nt, Artificial Sequence
  Synthetic
gaagauaugugaugggauc

SEQ ID NO: 17499 - RNA, 19 nt, Artificial Sequence
  Synthetic
gccuugaugugguaggaaa

SEQ ID NO: 17500 - RNA, 19 nt, Artificial Sequence
  Synthetic
ccuaauaucgagaaaugaa

SEQ ID NO: 17501 - RNA, 19 nt, Artificial Sequence
  Synthetic
caaagugaagguuggcaaa

SEQ ID NO: 17502 - RNA, 19 nt, Artificial Sequence
  Synthetic
gcagagaaauucagaaccu

SEQ ID NO: 17503 - RNA, 19 nt, Artificial Sequence
  Synthetic
uaaaguagcugugaagaua

SEQ ID NO: 17504 - RNA, 19 nt, Artificial Sequence
  Synthetic
augcaaagauagcugauuu

SEQ ID NO: 17505 - RNA, 19 nt, Artificial Sequence
  Synthetic
aagucaaagucgaccaaau

SEQ ID NO: 17506 - RNA, 19 nt, Artificial Sequence
  Synthetic
gaugucagauggugaauuu

SEQ ID NO: 17507 - RNA, 19 nt, Artificial Sequence
  Synthetic
agacucaguuccuggagaa

SEQ ID NO: 17508 - RNA, 19 nt, Artificial Sequence
  Synthetic
caaccaugauugaugauga

SEQ ID NO: 17509 - RNA, 19 nt, Artificial Sequence
  Synthetic
ugaaugaagccaaagauuu

SEQ ID NO: 17510 - RNA, 19 nt, Artificial Sequence
  Synthetic
caaaugauauuauggcaga

SEQ ID NO: 17511 - RNA, 19 nt, Artificial Sequence
  Synthetic
gguuauucucuaugcuuua

SEQ ID NO: 17512 - RNA, 19 nt, Artificial Sequence
  Synthetic
guuuagauguuguuggaaa

SEQ ID NO: 17513 - RNA, 19 nt, Artificial Sequence
  Synthetic
ccauaaaguggcaguuaaa

SEQ ID NO: 17514 - RNA, 19 nt, Artificial Sequence
  Synthetic
gugaaagaagugugugaaa

SEQ ID NO: 17515 - RNA, 19 nt, Artificial Sequence
  Synthetic
guacagaaucagaaguaau

SEQ ID NO: 17516 - RNA, 19 nt, Artificial Sequence
  Synthetic
ggaagguagugaaugcaua

SEQ ID NO: 17517 - RNA, 19 nt, Artificial Sequence
  Synthetic
acacaugaaugccaagaua

SEQ ID NO: 17518 - RNA, 19 nt, Artificial Sequence
  Synthetic
aagcauugaugaugaagua

SEQ ID NO: 17519 - RNA, 19 nt, Artificial Sequence
  Synthetic
gagcaaaccguaugacauu

SEQ ID NO: 17520 - RNA, 19 nt, Artificial Sequence
  Synthetic
agugaagauuggagaacau

SEQ ID NO: 17521 - RNA, 19 nt, Artificial Sequence
  Synthetic
cagaaguaaugaacaguuu

SEQ ID NO: 17522 - RNA, 19 nt, Artificial Sequence
  Synthetic
cuaugaagcagcuggauuu

SEQ ID NO: 17523 - RNA, 19 nt, Artificial Sequence
  Synthetic
gauuacugucauaggcaua

SEQ ID NO: 17524 - RNA, 19 nt, Artificial Sequence
  Synthetic
augaugaggcugugaaaga

SEQ ID NO: 17525 - RNA, 19 nt, Artificial Sequence
  Synthetic
acauuauggcugaaguuua

SEQ ID NO: 17526 - RNA, 19 nt, Artificial Sequence
  Synthetic
ggagcuaucuuuuggacuu

SEQ ID NO: 17527 - RNA, 19 nt, Artificial Sequence
  Synthetic
gcuguuugguguaguaaau

SEQ ID NO: 17528 - RNA, 19 nt, Artificial Sequence
  Synthetic
acagaagauucgcaguuua

SEQ ID NO: 17529 - RNA, 19 nt, Artificial Sequence
  Synthetic
gcaugaaugguuuaaacaa

SEQ ID NO: 17530 - RNA, 19 nt, Artificial Sequence
  Synthetic
uaaagaaccacgaguaaga

SEQ ID NO: 17531 - RNA, 19 nt, Artificial Sequence
  Synthetic
ccugaaaccucauccagaa

SEQ ID NO: 17532 - RNA, 19 nt, Artificial Sequence
  Synthetic
gaggugaauuauuugacua

SEQ ID NO: 17533 - RNA, 19 nt, Artificial Sequence
  Synthetic
gaugauagugccaugcaua

SEQ ID NO: 17534 - RNA, 19 nt, Artificial Sequence
  Synthetic
gcagagagccauucacuuu

SEQ ID NO: 17535 - RNA, 19 nt, Artificial Sequence
  Synthetic
ucaauuaacaggccauaaa

SEQ ID NO: 17536 - RNA, 19 nt, Artificial Sequence
  Synthetic
gcuaugaagcagcuggauu

SEQ ID NO: 17537 - RNA, 19 nt, Artificial Sequence
  Synthetic
gcaaagugaagauuggaga

SEQ ID NO: 17538 - RNA, 19 nt, Artificial Sequence
  Synthetic
gcugaaguuuaccgagcua

SEQ ID NO: 17539 - RNA, 19 nt, Artificial Sequence
  Synthetic
cuaaauuucaguaggcuuu

SEQ ID NO: 17540 - RNA, 19 nt, Artificial Sequence
  Synthetic
cguaugacauuauggcuga

SEQ ID NO: 17541 - RNA, 19 nt, Artificial Sequence
  Synthetic
gggugaugcuggugaaaca

SEQ ID NO: 17542 - RNA, 19 nt, Artificial Sequence
  Synthetic
gaacacacccugaaugaaa

SEQ ID NO: 17543 - RNA, 19 nt, Artificial Sequence
  Synthetic
ccaugaagauccucgacaa

SEQ ID NO: 17544 - RNA, 19 nt, Artificial Sequence
  Synthetic
cgaguaacuuugacgacua

SEQ ID NO: 17545 - RNA, 19 nt, Artificial Sequence
  Synthetic
caggagagcgugaaagaau

SEQ ID NO: 17546 - RNA, 19 nt, Artificial Sequence
  Synthetic
cgacuaugaggaagaagaa

SEQ ID NO: 17547 - RNA, 19 nt, Artificial Sequence
  Synthetic
acaaacagaagguggugaa

SEQ ID NO: 17548 - RNA, 19 nt, Artificial Sequence
  Synthetic
caugaagauccucgacaaa

SEQ ID NO: 17549 - RNA, 19 nt, Artificial Sequence
  Synthetic
acuaugaggaagaagaaau

SEQ ID NO: 17550 - RNA, 19 nt, Artificial Sequence
  Synthetic
ugaaggaccugcugcggaa

SEQ ID NO: 17551 - RNA, 19 nt, Artificial Sequence
  Synthetic
agccaaagccaaagaagau

SEQ ID NO: 17552 - RNA, 19 nt, Artificial Sequence
  Synthetic
cguccugaccuuugaguau

SEQ ID NO: 17553 - RNA, 19 nt, Artificial Sequence
  Synthetic
ugaagauccucgacaaaca

SEQ ID NO: 17554 - RNA, 19 nt, Artificial Sequence
  Synthetic
cugagauuauccugagcaa

SEQ ID NO: 17555 - RNA, 19 nt, Artificial Sequence
  Synthetic
auucuuagccaaagccaaa

SEQ ID NO: 17556 - RNA, 19 nt, Artificial Sequence
  Synthetic
gcuaagggcaaaugaacga

SEQ ID NO: 17557 - RNA, 19 nt, Artificial Sequence
  Synthetic
gggacaggguauggaaaga

SEQ ID NO: 17558 - RNA, 19 nt, Artificial Sequence
  Synthetic
aggagagcgugaaagaauu

SEQ ID NO: 17559 - RNA, 19 nt, Artificial Sequence
  Synthetic
uuaaagagaagcagacuga

SEQ ID NO: 17560 - RNA, 19 nt, Artificial Sequence
  Synthetic
aacagaagguggugaaacu

SEQ ID NO: 17561 - RNA, 19 nt, Artificial Sequence
  Synthetic
ccuucauaccaaaguuuaa

SEQ ID NO: 17562 - RNA, 19 nt, Artificial Sequence
  Synthetic
gggucaacgauaucaagaa

SEQ ID NO: 17563 - RNA, 19 nt, Artificial Sequence
  Synthetic
guuuaaaggcccuggggau

SEQ ID NO: 17564 - RNA, 19 nt, Artificial Sequence
  Synthetic
ucauugaccagcagggcua

SEQ ID NO: 17565 - RNA, 19 nt, Artificial Sequence
  Synthetic
caaccuuccuuucggagua

SEQ ID NO: 17566 - RNA, 19 nt, Artificial Sequence
  Synthetic
uggaucaguuugaacgaau

SEQ ID NO: 17567 - RNA, 19 nt, Artificial Sequence
  Synthetic
augaaauggccgcuggcua

SEQ ID NO: 17568 - RNA, 19 nt, Artificial Sequence
  Synthetic
gagcaggaagcccagauaa

SEQ ID NO: 17569 - RNA, 19 nt, Artificial Sequence
  Synthetic
auaaucagagggacagaaa

SEQ ID NO: 17570 - RNA, 19 nt, Artificial Sequence
  Synthetic
gaguaugcuuuuaaggaua

SEQ ID NO: 17571 - RNA, 19 nt, Artificial Sequence
  Synthetic
caacacacgagaagaguua

SEQ ID NO: 17572 - RNA, 19 nt, Artificial Sequence
  Synthetic
gaagagucauguugguaaa

SEQ ID NO: 17573 - RNA, 19 nt, Artificial Sequence
  Synthetic
gagcauacuuugaaugaga

SEQ ID NO: 17574 - RNA, 19 nt, Artificial Sequence
  Synthetic
uggaaacaauauagaggua

SEQ ID NO: 17575 - RNA, 19 nt, Artificial Sequence
  Synthetic
ggucacagacuuuggguuu

SEQ ID NO: 17576 - RNA, 19 nt, Artificial Sequence
  Synthetic
cagcauuucuguagguauu

SEQ ID NO: 17577 - RNA, 19 nt, Artificial Sequence
  Synthetic
ggaagagucauguugguaa

SEQ ID NO: 17578 - RNA, 19 nt, Artificial Sequence
  Synthetic
gaauggugucagugauaua

SEQ ID NO: 17579 - RNA, 19 nt, Artificial Sequence
  Synthetic
caaaagaguuaaaggcaga

SEQ ID NO: 17580 - RNA, 19 nt, Artificial Sequence
  Synthetic
guugagaauccauggcuua

SEQ ID NO: 17581 - RNA, 19 nt, Artificial Sequence
  Synthetic
aggcagaacuuggacauua

SEQ ID NO: 17582 - RNA, 19 nt, Artificial Sequence
  Synthetic
aagaauggugucagugaua

SEQ ID NO: 17583 - RNA, 19 nt, Artificial Sequence
  Synthetic
ggaaagggaacaaagugua

SEQ ID NO: 17584 - RNA, 19 nt, Artificial Sequence
  Synthetic
guucaguguuuguugagaa

SEQ ID NO: 17585 - RNA, 19 nt, Artificial Sequence
  Synthetic
ccagcaacuuugaugacua

SEQ ID NO: 17586 - RNA, 19 nt, Artificial Sequence
  Synthetic
gaauaaugccggacuugaa

SEQ ID NO: 17587 - RNA, 19 nt, Artificial Sequence
  Synthetic
guuucuagccaaagccaaa

SEQ ID NO: 17588 - RNA, 19 nt, Artificial Sequence
  Synthetic
guuguuaaacugaagcaaa

SEQ ID NO: 17589 - RNA, 19 nt, Artificial Sequence
  Synthetic
agacuaacuuucuuggaau

SEQ ID NO: 17590 - RNA, 19 nt, Artificial Sequence
  Synthetic
guggaaauuucaagcacuu

SEQ ID NO: 17591 - RNA, 19 nt, Artificial Sequence
  Synthetic
aagaagaauuggaagguuc

SEQ ID NO: 17592 - RNA, 19 nt, Artificial Sequence
  Synthetic
guucuaugcagcucagaua

SEQ ID NO: 17593 - RNA, 19 nt, Artificial Sequence
  Synthetic
gcauacuuugaaugagaaa

SEQ ID NO: 17594 - RNA, 19 nt, Artificial Sequence
  Synthetic
uauuacaggcagugaauuu

SEQ ID NO: 17595 - RNA, 19 nt, Artificial Sequence
  Synthetic
ggagaauccaacucagaau

SEQ ID NO: 17596 - RNA, 19 nt, Artificial Sequence
  Synthetic
ggaguaugcuuuuaaggau

SEQ ID NO: 17597 - RNA, 19 nt, Artificial Sequence
  Synthetic
ugaaauggcagcuggcuau

SEQ ID NO: 17598 - RNA, 19 nt, Artificial Sequence
  Synthetic
uggauuugaccaagagauu

SEQ ID NO: 17599 - RNA, 19 nt, Artificial Sequence
  Synthetic
gaaagggaacaaaguguau

SEQ ID NO: 17600 - RNA, 19 nt, Artificial Sequence
  Synthetic
ccagauauuuggaggaaca

SEQ ID NO: 17601 - RNA, 19 nt, Artificial Sequence
  Synthetic
ccaugaagauccucaacaa

SEQ ID NO: 17602 - RNA, 19 nt, Artificial Sequence
  Synthetic
uaagagaggaugaaugaaa

SEQ ID NO: 17603 - RNA, 19 nt, Artificial Sequence
  Synthetic
ccaguaacuuugacgacua

SEQ ID NO: 17604 - RNA, 19 nt, Artificial Sequence
  Synthetic
agaagguggugaagaugaa

SEQ ID NO: 17605 - RNA, 19 nt, Artificial Sequence
  Synthetic
agccaaagccagaggagau

SEQ ID NO: 17606 - RNA, 19 nt, Artificial Sequence
  Synthetic
ccgagaucauccugagcaa

SEQ ID NO: 17607 - RNA, 19 nt, Artificial Sequence
  Synthetic
gggugaugcuggugaggca

SEQ ID NO: 17608 - RNA, 19 nt, Artificial Sequence
  Synthetic
agcagaagguggugaagau

SEQ ID NO: 17609 - RNA, 19 nt, Artificial Sequence
  Synthetic
ucaccaagcgcuucggaaa

SEQ ID NO: 17610 - RNA, 19 nt, Artificial Sequence
  Synthetic
gagcaggaggagagcguga

SEQ ID NO: 17611 - RNA, 19 nt, Artificial Sequence
  Synthetic
gggcuguuugcuagaauaa

SEQ ID NO: 17612 - RNA, 19 nt, Artificial Sequence
  Synthetic
ugggaaggagagagguuua

SEQ ID NO: 17613 - RNA, 19 nt, Artificial Sequence
  Synthetic
acgacuacgaggaggaaga

SEQ ID NO: 17614 - RNA, 19 nt, Artificial Sequence
  Synthetic
acuaagagaggaugaauga

SEQ ID NO: 17615 - RNA, 19 nt, Artificial Sequence
  Synthetic
ugaagcaggucgagcacau

SEQ ID NO: 17616 - RNA, 19 nt, Artificial Sequence
  Synthetic
acaccuacccuuuggagua

SEQ ID NO: 17617 - RNA, 19 nt, Artificial Sequence
  Synthetic
gauauuuggaggaacagaa

SEQ ID NO: 17618 - RNA, 19 nt, Artificial Sequence
  Synthetic
caaggaguuuucugaguuu

SEQ ID NO: 17619 - RNA, 19 nt, Artificial Sequence
  Synthetic
ccauccagaucuacgagaa

SEQ ID NO: 17620 - RNA, 19 nt, Artificial Sequence
  Synthetic
cagaguuccuuguaucuaa

SEQ ID NO: 17621 - RNA, 19 nt, Artificial Sequence
  Synthetic
cagaagguggugaagauga

SEQ ID NO: 17622 - RNA, 19 nt, Artificial Sequence
  Synthetic
gagcacauacugaacgaga

SEQ ID NO: 17623 - RNA, 19 nt, Artificial Sequence
  Synthetic
ucaucgaccagcagggcua

SEQ ID NO: 17624 - RNA, 19 nt, Artificial Sequence
  Synthetic
ugagcaaaggcuacaacaa

SEQ ID NO: 17625 - RNA, 19 nt, Artificial Sequence
  Synthetic
aagagaggaugaaugaaaa

SEQ ID NO: 17626 - RNA, 19 nt, Artificial Sequence
  Synthetic
gcccagauauuuggaggaa

SEQ ID NO: 17627 - RNA, 19 nt, Artificial Sequence
  Synthetic
gcuguuugcuagaauaaaa

SEQ ID NO: 17628 - RNA, 19 nt, Artificial Sequence
  Synthetic
augagauggccgugggcuu

SEQ ID NO: 17629 - RNA, 19 nt, Artificial Sequence
  Synthetic
gggaugggaggguuggauu

SEQ ID NO: 17630 - RNA, 19 nt, Artificial Sequence
  Synthetic
agaugaaacuugagggaau

SEQ ID NO: 17631 - RNA, 19 nt, Artificial Sequence
  Synthetic
gagaauggauuuauagcua

SEQ ID NO: 17632 - RNA, 19 nt, Artificial Sequence
  Synthetic
gaagaacacaagauagaaa

SEQ ID NO: 17633 - RNA, 19 nt, Artificial Sequence
  Synthetic
gcucacagguggagagaag

SEQ ID NO: 17634 - RNA, 19 nt, Artificial Sequence
  Synthetic
gcuagaagaacacaagaua

SEQ ID NO: 17635 - RNA, 19 nt, Artificial Sequence
  Synthetic
gaggaaagagaauggauuu

SEQ ID NO: 17636 - RNA, 19 nt, Artificial Sequence
  Synthetic
cagaaaagaccuacaacaa

SEQ ID NO: 17637 - RNA, 19 nt, Artificial Sequence
  Synthetic
ggucaagggaauuguauca

SEQ ID NO: 17638 - RNA, 19 nt, Artificial Sequence
  Synthetic
uagaagaacacaagauaga

SEQ ID NO: 17639 - RNA, 19 nt, Artificial Sequence
  Synthetic
ugggauaguaagaagcaaa

SEQ ID NO: 17640 - RNA, 19 nt, Artificial Sequence
  Synthetic
gguacagaucuaugagcua

SEQ ID NO: 17641 - RNA, 19 nt, Artificial Sequence
  Synthetic
ggaggaaagagaauggauu

SEQ ID NO: 17642 - RNA, 19 nt, Artificial Sequence
  Synthetic
ugacuaaagccuugcaaca

SEQ ID NO: 17643 - RNA, 19 nt, Artificial Sequence
  Synthetic
augauguggucaagggaau

SEQ ID NO: 17644 - RNA, 19 nt, Artificial Sequence
  Synthetic
cagccuugguacagaucua

SEQ ID NO: 17645 - RNA, 19 nt, Artificial Sequence
  Synthetic
gauucaacccuaagauaau

SEQ ID NO: 17646 - RNA, 19 nt, Artificial Sequence
  Synthetic
ucacagguggagagaagaa

SEQ ID NO: 17647 - RNA, 19 nt, Artificial Sequence
  Synthetic
acuccaaguuugauguuau

SEQ ID NO: 17648 - RNA, 19 nt, Artificial Sequence
  Synthetic
aguuauugacccagaauca

SEQ ID NO: 17649 - RNA, 19 nt, Artificial Sequence
  Synthetic
gaugaaacuugagggaauu

SEQ ID NO: 17650 - RNA, 19 nt, Artificial Sequence
  Synthetic
agacaaauucugaucucua

SEQ ID NO: 17651 - RNA, 19 nt, Artificial Sequence
  Synthetic
ugauucaacccuaagauaa

SEQ ID NO: 17652 - RNA, 19 nt, Artificial Sequence
  Synthetic
caucaacaggcuaguggaa

SEQ ID NO: 17653 - RNA, 19 nt, Artificial Sequence
  Synthetic
agauagaaacuuggagaga

SEQ ID NO: 17654 - RNA, 19 nt, Artificial Sequence
  Synthetic
uuguagugguggaugaaaa

SEQ ID NO: 17655 - RNA, 19 nt, Artificial Sequence
  Synthetic
agccagaguucauguccaa

SEQ ID NO: 17656 - RNA, 19 nt, Artificial Sequence
  Synthetic
augaaaaugauguggucaa

SEQ ID NO: 17657 - RNA, 19 nt, Artificial Sequence
  Synthetic
cuucauuaauucggaacaa

SEQ ID NO: 17658 - RNA, 19 nt, Artificial Sequence
  Synthetic
ggaacaagauccacaggcu

SEQ ID NO: 17659 - RNA, 19 nt, Artificial Sequence
  Synthetic
ugccagugguggaugagaa

SEQ ID NO: 17660 - RNA, 19 nt, Artificial Sequence
  Synthetic
agaaagaauccgugggaaa

SEQ ID NO: 17661 - RNA, 19 nt, Artificial Sequence
  Synthetic
agaaugagcaauugagaaa

SEQ ID NO: 17662 - RNA, 19 nt, Artificial Sequence
  Synthetic
ucaaagacuagaagggaaa

SEQ ID NO: 17663 - RNA, 19 nt, Artificial Sequence
  Synthetic
ggagaagcccugaggaaga

SEQ ID NO: 17664 - RNA, 19 nt, Artificial Sequence
  Synthetic
ggacaugagugugggagaa

SEQ ID NO: 17665 - RNA, 19 nt, Artificial Sequence
  Synthetic
cuagaagggaaauggauaa

SEQ ID NO: 17666 - RNA, 19 nt, Artificial Sequence
  Synthetic
gggaagugaucgacaggau

SEQ ID NO: 17667 - RNA, 19 nt, Artificial Sequence
  Synthetic
acaccaugcuggagaucaa

SEQ ID NO: 17668 - RNA, 19 nt, Artificial Sequence
  Synthetic
auugagaccuggagggaga

SEQ ID NO: 17669 - RNA, 19 nt, Artificial Sequence
  Synthetic
ugggagaagcccugaggaa

SEQ ID NO: 17670 - RNA, 19 nt, Artificial Sequence
  Synthetic
acuagaagggaaauggaua

SEQ ID NO: 17671 - RNA, 19 nt, Artificial Sequence
  Synthetic
gagaaugagcaauugagaa

SEQ ID NO: 17672 - RNA, 19 nt, Artificial Sequence
  Synthetic
gggccaaagccuugagaug

SEQ ID NO: 17673 - RNA, 19 nt, Artificial Sequence
  Synthetic
gcuccaagcuagucaucuu

SEQ ID NO: 17674 - RNA, 19 nt, Artificial Sequence
  Synthetic
uagaaggccugcuggaaga

SEQ ID NO: 17675 - RNA, 19 nt, Artificial Sequence
  Synthetic
gggaugacgaacugcggaa

SEQ ID NO: 17676 - RNA, 19 nt, Artificial Sequence
  Synthetic
gccaaagccuugagaugga

SEQ ID NO: 17677 - RNA, 19 nt, Artificial Sequence
  Synthetic
accagaggcacuaggauua

SEQ ID NO: 17678 - RNA, 19 nt, Artificial Sequence
  Synthetic
aaggagaacagcugaguca

SEQ ID NO: 17679 - RNA, 19 nt, Artificial Sequence
  Synthetic
gaacaacauaagauugaga

SEQ ID NO: 17680 - RNA, 19 nt, Artificial Sequence
  Synthetic
ucuaugagauugaacaaca

SEQ ID NO: 17681 - RNA, 19 nt, Artificial Sequence
  Synthetic
gaagggaacuggagaacuc

SEQ ID NO: 17682 - RNA, 19 nt, Artificial Sequence
  Synthetic
cugcacugccuguggucaa

SEQ ID NO: 17683 - RNA, 19 nt, Artificial Sequence
  Synthetic
ccuacaaccaccuggacau

SEQ ID NO: 17684 - RNA, 19 nt, Artificial Sequence
  Synthetic
ggcagaagucgguggagga

SEQ ID NO: 17685 - RNA, 19 nt, Artificial Sequence
  Synthetic
caccaugggaugaugaaau

SEQ ID NO: 17686 - RNA, 19 nt, Artificial Sequence
  Synthetic
ggaagugaucgacaggauu

SEQ ID NO: 17687 - RNA, 19 nt, Artificial Sequence
  Synthetic
cacuaugucuggagggagu

SEQ ID NO: 17688 - RNA, 19 nt, Artificial Sequence
  Synthetic
agaccuggagggagaucua

SEQ ID NO: 17689 - RNA, 19 nt, Artificial Sequence
  Synthetic
caugggaugaugaaauuaa

SEQ ID NO: 17690 - RNA, 19 nt, Artificial Sequence
  Synthetic
gggaauacuuugagagguu

SEQ ID NO: 17691 - RNA, 19 nt, Artificial Sequence
  Synthetic
gauaaugagagaagugaua

SEQ ID NO: 17692 - RNA, 19 nt, Artificial Sequence
  Synthetic
cgagacagcuauagaagaa

SEQ ID NO: 17693 - RNA, 19 nt, Artificial Sequence
  Synthetic
uggagaaggaggaggcaaa

SEQ ID NO: 17694 - RNA, 19 nt, Artificial Sequence
  Synthetic
ggaagauguaugaggaauu

SEQ ID NO: 17695 - RNA, 19 nt, Artificial Sequence
  Synthetic
gcucauacacaguuaaaua

SEQ ID NO: 17696 - RNA, 19 nt, Artificial Sequence
  Synthetic
agauacagauggagcaaau

SEQ ID NO: 17697 - RNA, 19 nt, Artificial Sequence
  Synthetic
gaugcugaauugagaauaa

SEQ ID NO: 17698 - RNA, 19 nt, Artificial Sequence
  Synthetic
auaagguaauguaggguua

SEQ ID NO: 17699 - RNA, 19 nt, Artificial Sequence
  Synthetic
gagcaaauguccuaacaga

SEQ ID NO: 17700 - RNA, 19 nt, Artificial Sequence
  Synthetic
cuacaacgucggucagaaa

SEQ ID NO: 17701 - RNA, 19 nt, Artificial Sequence
  Synthetic
ugagaaagcggaagaugua

SEQ ID NO: 17702 - RNA, 19 nt, Artificial Sequence
  Synthetic
ccaaaagauuacaagacaa

SEQ ID NO: 17703 - RNA, 19 nt, Artificial Sequence
  Synthetic
agauuguggugcagggaga

SEQ ID NO: 17704 - RNA, 19 nt, Artificial Sequence
  Synthetic
cagacauccucaaacgaaa

SEQ ID NO: 17705 - RNA, 19 nt, Artificial Sequence
  Synthetic
cuacauucuugguuguuaa

SEQ ID NO: 17706 - RNA, 19 nt, Artificial Sequence
  Synthetic
uuaaauuggucaugguaga

SEQ ID NO: 17707 - RNA, 19 nt, Artificial Sequence
  Synthetic
gcaaauguccuaacagaga

SEQ ID NO: 17708 - RNA, 19 nt, Artificial Sequence
  Synthetic
caggagagacugugauuca

SEQ ID NO: 17709 - RNA, 19 nt, Artificial Sequence
  Synthetic
gcggaagauguaugaggaa

SEQ ID NO: 17710 - RNA, 19 nt, Artificial Sequence
  Synthetic
ugggaagcacacugagaaa

SEQ ID NO: 17711 - RNA, 19 nt, Artificial Sequence
  Synthetic
gguuaaagguaggaggcga

SEQ ID NO: 17712 - RNA, 19 nt, Artificial Sequence
  Synthetic
agcaaagacaaaugugaaa

SEQ ID NO: 17713 - RNA, 19 nt, Artificial Sequence
  Synthetic
ccaaauaauugaucagaug

SEQ ID NO: 17714 - RNA, 19 nt, Artificial Sequence
  Synthetic
gagaacuugcuuugauuua

SEQ ID NO: 17715 - RNA, 19 nt, Artificial Sequence
  Synthetic
gcacgcagccuucgagaau

SEQ ID NO: 17716 - RNA, 19 nt, Artificial Sequence
  Synthetic
guuaacaaugaaugggcaa

SEQ ID NO: 17717 - RNA, 19 nt, Artificial Sequence
  Synthetic
cggaagauguaugaggaau

SEQ ID NO: 17718 - RNA, 19 nt, Artificial Sequence
  Synthetic
aagcaaagacaaaugugaa

SEQ ID NO: 17719 - RNA, 19 nt, Artificial Sequence
  Synthetic
gggagugacugcaagcauu

SEQ ID NO: 17720 - RNA, 19 nt, Artificial Sequence
  Synthetic
agucaaagcugaugagcau

SEQ ID NO: 17721 - RNA, 19 nt, Artificial Sequence
  Synthetic
gguuaugggcauuuagaaa

SEQ ID NO: 17722 - RNA, 19 nt, Artificial Sequence
  Synthetic
gaaugaagauuguggaugu

SEQ ID NO: 17723 - RNA, 19 nt, Artificial Sequence
  Synthetic
aggaacagcuggugaagau

SEQ ID NO: 17724 - RNA, 19 nt, Artificial Sequence
  Synthetic
gcaaagaagaggaagaugu

SEQ ID NO: 17725 - RNA, 19 nt, Artificial Sequence
  Synthetic
caggaagcuugcaaagaua

SEQ ID NO: 17726 - RNA, 19 nt, Artificial Sequence
  Synthetic
cggaggaggacgaggacuu

SEQ ID NO: 17727 - RNA, 19 nt, Artificial Sequence
  Synthetic
cugaugaggaagaggaaga

SEQ ID NO: 17728 - RNA, 19 nt, Artificial Sequence
  Synthetic
aaacaaggauggugggaac

SEQ ID NO: 17729 - RNA, 19 nt, Artificial Sequence
  Synthetic
cgggugacuuuuagaagaa

SEQ ID NO: 17730 - RNA, 19 nt, Artificial Sequence
  Synthetic
cuauaacccugaugaggaa

SEQ ID NO: 17731 - RNA, 19 nt, Artificial Sequence
  Synthetic
gaacagagaugcagacuuc

SEQ ID NO: 17732 - RNA, 19 nt, Artificial Sequence
  Synthetic
ccacagaacacauacagaa

SEQ ID NO: 17733 - RNA, 19 nt, Artificial Sequence
  Synthetic
gaagauuguggauguaaua

SEQ ID NO: 17734 - RNA, 19 nt, Artificial Sequence
  Synthetic
ggaagauguuugaaucauu

SEQ ID NO: 17735 - RNA, 19 nt, Artificial Sequence
  Synthetic
ggauguaauaggagagaag

SEQ ID NO: 17736 - RNA, 19 nt, Artificial Sequence
  Synthetic
gagagaagaucuauaagga

SEQ ID NO: 17737 - RNA, 19 nt, Artificial Sequence
  Synthetic
cagauuuaauagacgagua

SEQ ID NO: 17738 - RNA, 19 nt, Artificial Sequence
  Synthetic
caucauagagucuggcgaa

SEQ ID NO: 17739 - RNA, 19 nt, Artificial Sequence
  Synthetic
gagaagaucuauaaggaug

SEQ ID NO: 17740 - RNA, 19 nt, Artificial Sequence
  Synthetic
aggaagaggaagauacaga

SEQ ID NO: 17741 - RNA, 19 nt, Artificial Sequence
  Synthetic
ucgaauucgcaguggagua

SEQ ID NO: 17742 - RNA, 19 nt, Artificial Sequence
  Synthetic
gaagugagcaucuugauua

SEQ ID NO: 17743 - RNA, 19 nt, Artificial Sequence
  Synthetic
gauacagauccaaggguga

SEQ ID NO: 17744 - RNA, 19 nt, Artificial Sequence
  Synthetic
gugaaaaggcugauagcuu

SEQ ID NO: 17745 - RNA, 19 nt, Artificial Sequence
  Synthetic
aaugcaaagaagaggaaga

SEQ ID NO: 17746 - RNA, 19 nt, Artificial Sequence
  Synthetic
uaauaggagagaagaucua

SEQ ID NO: 17747 - RNA, 19 nt, Artificial Sequence
  Synthetic
uggacaucaugaagaggaa

SEQ ID NO: 17748 - RNA, 19 nt, Artificial Sequence
  Synthetic
uuuaagugccugauacaaa

SEQ ID NO: 17749 - RNA, 19 nt, Artificial Sequence
  Synthetic
cggcaugucucuccaacaa

SEQ ID NO: 17750 - RNA, 19 nt, Artificial Sequence
  Synthetic
guucaaugcuccaguaaua

SEQ ID NO: 17751 - RNA, 19 nt, Artificial Sequence
  Synthetic
gagcauaacccuauauaaa

SEQ ID NO: 17752 - RNA, 19 nt, Artificial Sequence
  Synthetic
ugaaauuagugcagaaaga

SEQ ID NO: 17753 - RNA, 19 nt, Artificial Sequence
  Synthetic
ggaagagaauggugcagua

SEQ ID NO: 17754 - RNA, 19 nt, Artificial Sequence
  Synthetic
aaucagaaguggaagagaa

SEQ ID NO: 17755 - RNA, 19 nt, Artificial Sequence
  Synthetic
gaaaguaguagaugugaua

SEQ ID NO: 17756 - RNA, 19 nt, Artificial Sequence
  Synthetic
gcagaugucucaaguauua

SEQ ID NO: 17757 - RNA, 19 nt, Artificial Sequence
  Synthetic
ggguaaaucagaaguggaa

SEQ ID NO: 17758 - RNA, 19 nt, Artificial Sequence
  Synthetic
auacaacgauggagaacaa

SEQ ID NO: 17759 - RNA, 19 nt, Artificial Sequence
  Synthetic
gaugcagaguccaggauua

SEQ ID NO: 17760 - RNA, 19 nt, Artificial Sequence
  Synthetic
caggagaauaauugugaaa

SEQ ID NO: 17761 - RNA, 19 nt, Artificial Sequence
  Synthetic
ggugacaacuuuuauguaa

SEQ ID NO: 17762 - RNA, 19 nt, Artificial Sequence
  Synthetic
agagaauggugcaguagaa

SEQ ID NO: 17763 - RNA, 19 nt, Artificial Sequence
  Synthetic
gagcagaugucucaaguau

SEQ ID NO: 17764 - RNA, 19 nt, Artificial Sequence
  Synthetic
uguaauugauagaggcaca

SEQ ID NO: 17765 - RNA, 19 nt, Artificial Sequence
  Synthetic
cagaaagaacucagaugua

SEQ ID NO: 17766 - RNA, 19 nt, Artificial Sequence
  Synthetic
cuagaggaauagaaacaaa

SEQ ID NO: 17767 - RNA, 19 nt, Artificial Sequence
  Synthetic
gcaccaaaguauacaacga

SEQ ID NO: 17768 - RNA, 19 nt, Artificial Sequence
  Synthetic
guaaaucagaaguggaaga

SEQ ID NO: 17769 - RNA, 19 nt, Artificial Sequence
  Synthetic
ccuuaaaucuuuggaguuu

SEQ ID NO: 17770 - RNA, 19 nt, Artificial Sequence
  Synthetic
aggguaaccuucaggagaa

SEQ ID NO: 17771 - RNA, 19 nt, Artificial Sequence
  Synthetic
gcuuuaauguagacucaua

SEQ ID NO: 17772 - RNA, 19 nt, Artificial Sequence
  Synthetic
gcaaaaguauggagcaaga

SEQ ID NO: 17773 - RNA, 19 nt, Artificial Sequence
  Synthetic
aagaaaggguaaaucagaa

SEQ ID NO: 17774 - RNA, 19 nt, Artificial Sequence
  Synthetic
gcaauauacucuuacauga

SEQ ID NO: 17775 - RNA, 19 nt, Artificial Sequence
  Synthetic
gcauaacccuauauaaaga

SEQ ID NO: 17776 - RNA, 19 nt, Artificial Sequence
  Synthetic
guaauaaaccgauucacaa

SEQ ID NO: 17777 - RNA, 19 nt, Artificial Sequence
  Synthetic
gcaaagacauccugcuguu

SEQ ID NO: 17778 - RNA, 19 nt, Artificial Sequence
  Synthetic
ggucaaagauggggagcau

SEQ ID NO: 17779 - RNA, 19 nt, Artificial Sequence
  Synthetic
caguaugugcagaagcuua

SEQ ID NO: 17780 - RNA, 19 nt, Artificial Sequence
  Synthetic
gcaaaggacugaugaccaa

SEQ ID NO: 17781 - RNA, 19 nt, Artificial Sequence
  Synthetic
ccugaaaauuguaggguua

SEQ ID NO: 17782 - RNA, 19 nt, Artificial Sequence
  Synthetic
gcaaaggagcagagaacuu

SEQ ID NO: 17783 - RNA, 19 nt, Artificial Sequence
  Synthetic
cagaagaacuguaugcaau

SEQ ID NO: 17784 - RNA, 19 nt, Artificial Sequence
  Synthetic
gggagagggacgugagaga

SEQ ID NO: 17785 - RNA, 19 nt, Artificial Sequence
  Synthetic
gcccaaaguguguggcaaa

SEQ ID NO: 17786 - RNA, 19 nt, Artificial Sequence
  Synthetic
gaacauuaucuuaguggaa

SEQ ID NO: 17787 - RNA, 19 nt, Artificial Sequence
  Synthetic
aagaagaaggugaguacua

SEQ ID NO: 17788 - RNA, 19 nt, Artificial Sequence
  Synthetic
caaccuugaccgagugaaa

SEQ ID NO: 17789 - RNA, 19 nt, Artificial Sequence
  Synthetic
gagcagagaacuuugacaa

SEQ ID NO: 17790 - RNA, 19 nt, Artificial Sequence
  Synthetic
caggaagggcacagaagaa

SEQ ID NO: 17791 - RNA, 19 nt, Artificial Sequence
  Synthetic
cggaggaucgacugggaaa

SEQ ID NO: 17792 - RNA, 19 nt, Artificial Sequence
  Synthetic
ggaucgaacaacaaggaau

SEQ ID NO: 17793 - RNA, 19 nt, Artificial Sequence
  Synthetic
uggcaaaggagcagagaac

SEQ ID NO: 17794 - RNA, 19 nt, Artificial Sequence
  Synthetic
uguacuucgucauggaaua

SEQ ID NO: 17795 - RNA, 19 nt, Artificial Sequence
  Synthetic
agaaggauguggugauuca

SEQ ID NO: 17796 - RNA, 19 nt, Artificial Sequence
  Synthetic
ccaagaagaaggugaguac

SEQ ID NO: 17797 - RNA, 19 nt, Artificial Sequence
  Synthetic
ggagcaagcacaaguucaa

SEQ ID NO: 17798 - RNA, 19 nt, Artificial Sequence
  Synthetic
ggacugggaucgaacaaca

SEQ ID NO: 17799 - RNA, 19 nt, Artificial Sequence
  Synthetic
caaucaaaauccugaagaa

SEQ ID NO: 17800 - RNA, 19 nt, Artificial Sequence
  Synthetic
agucuaucauggagcacaa

SEQ ID NO: 17801 - RNA, 19 nt, Artificial Sequence
  Synthetic
ugaagaaggauguggugau

SEQ ID NO: 17802 - RNA, 19 nt, Artificial Sequence
  Synthetic
caagaaugaaagcaagcaa

SEQ ID NO: 17803 - RNA, 19 nt, Artificial Sequence
  Synthetic
acauucagcaaguaggaaa

SEQ ID NO: 17804 - RNA, 19 nt, Artificial Sequence
  Synthetic
aagaaugaaagcaagcaaa

SEQ ID NO: 17805 - RNA, 19 nt, Artificial Sequence
  Synthetic
aagaugaagacgagcuauu

SEQ ID NO: 17806 - RNA, 19 nt, Artificial Sequence
  Synthetic
ucacaguacgagaugcaaa

SEQ ID NO: 17807 - RNA, 19 nt, Artificial Sequence
  Synthetic
uccucaugguguugggaaa

SEQ ID NO: 17808 - RNA, 19 nt, Artificial Sequence
  Synthetic
cuuaucagccguauggaaa

SEQ ID NO: 17809 - RNA, 19 nt, Artificial Sequence
  Synthetic
cuuacaaccaagaacauua

SEQ ID NO: 17810 - RNA, 19 nt, Artificial Sequence
  Synthetic
gggagaaacuugaacgcaa

SEQ ID NO: 17811 - RNA, 19 nt, Artificial Sequence
  Synthetic
gcaaagggcugaugaccaa

SEQ ID NO: 17812 - RNA, 19 nt, Artificial Sequence
  Synthetic
ggagaaacuugaacgcaaa

SEQ ID NO: 17813 - RNA, 19 nt, Artificial Sequence
  Synthetic
guauauugauugggagaaa

SEQ ID NO: 17814 - RNA, 19 nt, Artificial Sequence
  Synthetic
gaaccaaggucccggaaga

SEQ ID NO: 17815 - RNA, 19 nt, Artificial Sequence
  Synthetic
ugaaagaaucggacaaaga

SEQ ID NO: 17816 - RNA, 19 nt, Artificial Sequence
  Synthetic
cugugaagauccugaagaa

SEQ ID NO: 17817 - RNA, 19 nt, Artificial Sequence
  Synthetic
caucaggaauauugaccaa

SEQ ID NO: 17818 - RNA, 19 nt, Artificial Sequence
  Synthetic
caggaagucaucaggaaua

SEQ ID NO: 17819 - RNA, 19 nt, Artificial Sequence
  Synthetic
gaccaaacacccaggcaaa

SEQ ID NO: 17820 - RNA, 19 nt, Artificial Sequence
  Synthetic
gguuuaaguuacugagcca

SEQ ID NO: 17821 - RNA, 19 nt, Artificial Sequence
  Synthetic
gcagauggccuauggaaaa

SEQ ID NO: 17822 - RNA, 19 nt, Artificial Sequence
  Synthetic
ggaugaaacugaccgauuu

SEQ ID NO: 17823 - RNA, 19 nt, Artificial Sequence
  Synthetic
cgguauauugauugggaga

SEQ ID NO: 17824 - RNA, 19 nt, Artificial Sequence
  Synthetic
ccucguaagagaugcuaaa

SEQ ID NO: 17825 - RNA, 19 nt, Artificial Sequence
  Synthetic
ucuccaaauuugacaacaa

SEQ ID NO: 17826 - RNA, 19 nt, Artificial Sequence
  Synthetic
ggucaugcuuucagaacga

SEQ ID NO: 17827 - RNA, 19 nt, Artificial Sequence
  Synthetic
ugucagaucccuacguaaa

SEQ ID NO: 17828 - RNA, 19 nt, Artificial Sequence
  Synthetic
gcaugaugaaugugcacaa

SEQ ID NO: 17829 - RNA, 19 nt, Artificial Sequence
  Synthetic
cagaaggaagugaggccaa

SEQ ID NO: 17830 - RNA, 19 nt, Artificial Sequence
  Synthetic
gccaaaagcuugugggcga

SEQ ID NO: 17831 - RNA, 19 nt, Artificial Sequence
  Synthetic
caacagagaccggaugaaa

SEQ ID NO: 17832 - RNA, 19 nt, Artificial Sequence
  Synthetic
ccaaggaagcuguggccau

SEQ ID NO: 17833 - RNA, 19 nt, Artificial Sequence
  Synthetic
ggacaaagacagaagacug

SEQ ID NO: 17834 - RNA, 19 nt, Artificial Sequence
  Synthetic
gagauuugggauugggauu

SEQ ID NO: 17835 - RNA, 19 nt, Artificial Sequence
  Synthetic
gaaaagaacaugcucaaaa

SEQ ID NO: 17836 - RNA, 19 nt, Artificial Sequence
  Synthetic
gcugaaagaaucggacaaa

SEQ ID NO: 17837 - RNA, 19 nt, Artificial Sequence
  Synthetic
cggaugaaacugaccgauu

SEQ ID NO: 17838 - RNA, 19 nt, Artificial Sequence
  Synthetic
caucaagauugccgauuuu

SEQ ID NO: 17839 - RNA, 19 nt, Artificial Sequence
  Synthetic
ggauuugaccagcaggaau

SEQ ID NO: 17840 - RNA, 19 nt, Artificial Sequence
  Synthetic
cagcacagagcgugggaaa

SEQ ID NO: 17841 - RNA, 19 nt, Artificial Sequence
  Synthetic
gcaagaagaacaauggcaa

SEQ ID NO: 17842 - RNA, 19 nt, Artificial Sequence
  Synthetic
gcuucaagguucacaacua

SEQ ID NO: 17843 - RNA, 19 nt, Artificial Sequence
  Synthetic
gcaugaaugugcaccauaa

SEQ ID NO: 17844 - RNA, 19 nt, Artificial Sequence
  Synthetic
caucaagaaccaugaguuu

SEQ ID NO: 17845 - RNA, 19 nt, Artificial Sequence
  Synthetic
ggaaaacacuggugcagaa

SEQ ID NO: 17846 - RNA, 19 nt, Artificial Sequence
  Synthetic
gcagugaggacgaggccaa

SEQ ID NO: 17847 - RNA, 19 nt, Artificial Sequence
  Synthetic
guuuuaugccgcugagaua

SEQ ID NO: 17848 - RNA, 19 nt, Artificial Sequence
  Synthetic
gggaggacaugcaagacaa

SEQ ID NO: 17849 - RNA, 19 nt, Artificial Sequence
  Synthetic
aaacacuggugcagaagaa

SEQ ID NO: 17850 - RNA, 19 nt, Artificial Sequence
  Synthetic
acacuauauuccagaaaga

SEQ ID NO: 17851 - RNA, 19 nt, Artificial Sequence
  Synthetic
ccauguauccugaguggaa

SEQ ID NO: 17852 - RNA, 19 nt, Artificial Sequence
  Synthetic
caaccaagaggcugggaau

SEQ ID NO: 17853 - RNA, 19 nt, Artificial Sequence
  Synthetic
ccucagagccuguugggau

SEQ ID NO: 17854 - RNA, 19 nt, Artificial Sequence
  Synthetic
ccacaagguccugggcaaa

SEQ ID NO: 17855 - RNA, 19 nt, Artificial Sequence
  Synthetic
agaaaugcaucgacaagau

SEQ ID NO: 17856 - RNA, 19 nt, Artificial Sequence
  Synthetic
cucagagccuguugggaua

SEQ ID NO: 17857 - RNA, 19 nt, Artificial Sequence
  Synthetic
caccauaaaugccgggaga

SEQ ID NO: 17858 - RNA, 19 nt, Artificial Sequence
  Synthetic
ggaaggugcugcuuggaga

SEQ ID NO: 17859 - RNA, 19 nt, Artificial Sequence
  Synthetic
cgacaagaucaucggcaga

SEQ ID NO: 17860 - RNA, 19 nt, Artificial Sequence
  Synthetic
uccacaagguccugggcaa

SEQ ID NO: 17861 - RNA, 19 nt, Artificial Sequence
  Synthetic
caucaagauugccgacuuu

SEQ ID NO: 17862 - RNA, 19 nt, Artificial Sequence
  Synthetic
ggacacuauauuccagaaa

SEQ ID NO: 17863 - RNA, 19 nt, Artificial Sequence
  Synthetic
agaaagaacgcuucaacau

SEQ ID NO: 17864 - RNA, 19 nt, Artificial Sequence
  Synthetic
ccaucaaggcccucaagaa

SEQ ID NO: 17865 - RNA, 19 nt, Artificial Sequence
  Synthetic
cuggagaagcucuuugaaa

SEQ ID NO: 17866 - RNA, 19 nt, Artificial Sequence
  Synthetic
ggcuacaaaugcaggcaau

SEQ ID NO: 17867 - RNA, 19 nt, Artificial Sequence
  Synthetic
caacaagcaaggcuacaaa

SEQ ID NO: 17868 - RNA, 19 nt, Artificial Sequence
  Synthetic
ucaagaaccaugaguuuau

SEQ ID NO: 17869 - RNA, 19 nt, Artificial Sequence
  Synthetic
cagaagaagccgaccaugu

SEQ ID NO: 17870 - RNA, 19 nt, Artificial Sequence
  Synthetic
gggcaaagaugaaguauau

SEQ ID NO: 17871 - RNA, 19 nt, Artificial Sequence
  Synthetic
uggcagaacucaagggcaa

SEQ ID NO: 17872 - RNA, 19 nt, Artificial Sequence
  Synthetic
ucaucaagguguugggcaa

SEQ ID NO: 17873 - RNA, 19 nt, Artificial Sequence
  Synthetic
cuacauagcuccugagauc

SEQ ID NO: 17874 - RNA, 19 nt, Artificial Sequence
  Synthetic
ccaccaagcagaagaccaa

SEQ ID NO: 17875 - RNA, 19 nt, Artificial Sequence
  Synthetic
ucauaggaaagcagggaua

SEQ ID NO: 17876 - RNA, 19 nt, Artificial Sequence
  Synthetic
ccaaaagagacgucaauaa

SEQ ID NO: 17877 - RNA, 19 nt, Artificial Sequence
  Synthetic
agaucaaccaggaggaauu

SEQ ID NO: 17878 - RNA, 19 nt, Artificial Sequence
  Synthetic
acucaagggcaaagaugaa

SEQ ID NO: 17879 - RNA, 19 nt, Artificial Sequence
  Synthetic
aggaggaauucaaagguuu

SEQ ID NO: 17880 - RNA, 19 nt, Artificial Sequence
  Synthetic
gccagaaggaagaguguau

SEQ ID NO: 17881 - RNA, 19 nt, Artificial Sequence
  Synthetic
gggauuugaaacuggacaa

SEQ ID NO: 17882 - RNA, 19 nt, Artificial Sequence
  Synthetic
cgucauggaauauguaaau

SEQ ID NO: 17883 - RNA, 19 nt, Artificial Sequence
  Synthetic
ggagucaucuacagggauu

SEQ ID NO: 17884 - RNA, 19 nt, Artificial Sequence
  Synthetic
agggcaaagaugaaguaua

SEQ ID NO: 17885 - RNA, 19 nt, Artificial Sequence
  Synthetic
ggguuaaagaagcaggaga

SEQ ID NO: 17886 - RNA, 19 nt, Artificial Sequence
  Synthetic
cggaaacacccguaccuua

SEQ ID NO: 17887 - RNA, 19 nt, Artificial Sequence
  Synthetic
gcucauaaucacaaagugu

SEQ ID NO: 17888 - RNA, 19 nt, Artificial Sequence
  Synthetic
gcacaaugacagagaagag

SEQ ID NO: 17889 - RNA, 19 nt, Artificial Sequence
  Synthetic
cggcaggguuugcagugua

SEQ ID NO: 17890 - RNA, 19 nt, Artificial Sequence
  Synthetic
cuucaaaccacgcauuaaa

SEQ ID NO: 17891 - RNA, 19 nt, Artificial Sequence
  Synthetic
cgacaaugaggacgaccua

SEQ ID NO: 17892 - RNA, 19 nt, Artificial Sequence
  Synthetic
ggacgaagcaauuguaaag

SEQ ID NO: 17893 - RNA, 19 nt, Artificial Sequence
  Synthetic
ccuuugaggccgacaauga

SEQ ID NO: 17894 - RNA, 19 nt, Artificial Sequence
  Synthetic
gggcguuaccccagacaaa

SEQ ID NO: 17895 - RNA, 19 nt, Artificial Sequence
  Synthetic
gguuaaagaagcaggagac

SEQ ID NO: 17896 - RNA, 19 nt, Artificial Sequence
  Synthetic
gaagaguguaugugaucau

SEQ ID NO: 17897 - RNA, 19 nt, Artificial Sequence
  Synthetic
auuugaaacuggacaacau

SEQ ID NO: 17898 - RNA, 19 nt, Artificial Sequence
  Synthetic
aagcaauuguaaagcagau

SEQ ID NO: 17899 - RNA, 19 nt, Artificial Sequence
  Synthetic
augacagagaagaggauuu

SEQ ID NO: 17900 - RNA, 19 nt, Artificial Sequence
  Synthetic
ccucaugguucuaggaaaa

SEQ ID NO: 17901 - RNA, 19 nt, Artificial Sequence
  Synthetic
aggaggagggcgaguauua

SEQ ID NO: 17902 - RNA, 19 nt, Artificial Sequence
  Synthetic
gguacaaguuacugaacca

SEQ ID NO: 17903 - RNA, 19 nt, Artificial Sequence
  Synthetic
cgcuaaacccuguguggaa

SEQ ID NO: 17904 - RNA, 19 nt, Artificial Sequence
  Synthetic
cggugaaagccacgcuaaa

SEQ ID NO: 17905 - RNA, 19 nt, Artificial Sequence
  Synthetic
cagaagacccgaacgguga

SEQ ID NO: 17906 - RNA, 19 nt, Artificial Sequence
  Synthetic
gggagcggcuggaacgauu

SEQ ID NO: 17907 - RNA, 19 nt, Artificial Sequence
  Synthetic
uguauuucgugauggagua

SEQ ID NO: 17908 - RNA, 19 nt, Artificial Sequence
  Synthetic
gcagaugagauccacguaa

SEQ ID NO: 17909 - RNA, 19 nt, Artificial Sequence
  Synthetic
ccacagcagaugagaucca

SEQ ID NO: 17910 - RNA, 19 nt, Artificial Sequence
  Synthetic
acauucaacagcugggcaa

SEQ ID NO: 17911 - RNA, 19 nt, Artificial Sequence
  Synthetic
ggaaggugaugcuggccga

SEQ ID NO: 17912 - RNA, 19 nt, Artificial Sequence
  Synthetic
acugcacgcugguggagaa

SEQ ID NO: 17913 - RNA, 19 nt, Artificial Sequence
  Synthetic
gcaagggguuccugaccaa

SEQ ID NO: 17914 - RNA, 19 nt, Artificial Sequence
  Synthetic
gccacgaauuugugaccuu

SEQ ID NO: 17915 - RNA, 19 nt, Artificial Sequence
  Synthetic
ggaaugagaccuuuguguu

SEQ ID NO: 17916 - RNA, 19 nt, Artificial Sequence
  Synthetic
cugaugagcucuacgccau

SEQ ID NO: 17917 - RNA, 19 nt, Artificial Sequence
  Synthetic
ugaccaagcacccagggaa

SEQ ID NO: 17918 - RNA, 19 nt, Artificial Sequence
  Synthetic
aggccgauuuccagggcuu

SEQ ID NO: 17919 - RNA, 19 nt, Artificial Sequence
  Synthetic
augugaaacugaagcucau

SEQ ID NO: 17920 - RNA, 19 nt, Artificial Sequence
  Synthetic
ccuaccagcccuaugggaa

SEQ ID NO: 17921 - RNA, 19 nt, Artificial Sequence
  Synthetic
ccaggaggagggcgaguau

SEQ ID NO: 17922 - RNA, 19 nt, Artificial Sequence
  Synthetic
uggaacaaacugucaccua

SEQ ID NO: 17923 - RNA, 19 nt, Artificial Sequence
  Synthetic
ugaaccaggaggagggcga

SEQ ID NO: 17924 - RNA, 19 nt, Artificial Sequence
  Synthetic
gcggcgagaacuuugacaa

SEQ ID NO: 17925 - RNA, 19 nt, Artificial Sequence
  Synthetic
gcuaaacccuguguggaau

SEQ ID NO: 17926 - RNA, 19 nt, Artificial Sequence
  Synthetic
gucaagagccacaaguuca

SEQ ID NO: 17927 - RNA, 19 nt, Artificial Sequence
  Synthetic
guggauggcugguacaagu

SEQ ID NO: 17928 - RNA, 19 nt, Artificial Sequence
  Synthetic
ccuuuggaguucugcugua

SEQ ID NO: 17929 - RNA, 19 nt, Artificial Sequence
  Synthetic
gggaaagugugaagaauaa

SEQ ID NO: 17930 - RNA, 19 nt, Artificial Sequence
  Synthetic
ggaaaguauucgugguaau

SEQ ID NO: 17931 - RNA, 19 nt, Artificial Sequence
  Synthetic
caaagaaggaaaugggauu

SEQ ID NO: 17932 - RNA, 19 nt, Artificial Sequence
  Synthetic
gcaccaagcagaagaccaa

SEQ ID NO: 17933 - RNA, 19 nt, Artificial Sequence
  Synthetic
gggcauauaucaaagauga

SEQ ID NO: 17934 - RNA, 19 nt, Artificial Sequence
  Synthetic
gacaaggacuucaguguaa

SEQ ID NO: 17935 - RNA, 19 nt, Artificial Sequence
  Synthetic
cugugaaggugcugaagaa

SEQ ID NO: 17936 - RNA, 19 nt, Artificial Sequence
  Synthetic
ggguaaaugcgguggaacu

SEQ ID NO: 17937 - RNA, 19 nt, Artificial Sequence
  Synthetic
aaucaaaucccgagaagau

SEQ ID NO: 17938 - RNA, 19 nt, Artificial Sequence
  Synthetic
agccauggcacuagaaaua

SEQ ID NO: 17939 - RNA, 19 nt, Artificial Sequence
  Synthetic
ucaaggagcaagugaagaa

SEQ ID NO: 17940 - RNA, 19 nt, Artificial Sequence
  Synthetic
gauguuaacaggagccaaa

SEQ ID NO: 17941 - RNA, 19 nt, Artificial Sequence
  Synthetic
ugaccagauuuguggcuua

SEQ ID NO: 17942 - RNA, 19 nt, Artificial Sequence
  Synthetic
ggauggaacuuucagauau

SEQ ID NO: 17943 - RNA, 19 nt, Artificial Sequence
  Synthetic
caaaguggauucaaagauu

SEQ ID NO: 17944 - RNA, 19 nt, Artificial Sequence
  Synthetic
aggcagagaaugaagauga

SEQ ID NO: 17945 - RNA, 19 nt, Artificial Sequence
  Synthetic
gggaaaggagagcagcaaa

SEQ ID NO: 17946 - RNA, 19 nt, Artificial Sequence
  Synthetic
ggagggaaagugugaagaa

SEQ ID NO: 17947 - RNA, 19 nt, Artificial Sequence
  Synthetic
cuuuugaggcagagaauga

SEQ ID NO: 17948 - RNA, 19 nt, Artificial Sequence
  Synthetic
gcaaagaaggaaaugggau

SEQ ID NO: 17949 - RNA, 19 nt, Artificial Sequence
  Synthetic
gggaauaaugcgacaagga

SEQ ID NO: 17950 - RNA, 19 nt, Artificial Sequence
  Synthetic
gaauaaaguagaucugaga

SEQ ID NO: 17951 - RNA, 19 nt, Artificial Sequence
  Synthetic
auucaaagauugcagaaca

SEQ ID NO: 17952 - RNA, 19 nt, Artificial Sequence
  Synthetic
gagcagcaaagaaggaaau

SEQ ID NO: 17953 - RNA, 19 nt, Artificial Sequence
  Synthetic
ccaacaaacccacguacaa

SEQ ID NO: 17954 - RNA, 19 nt, Artificial Sequence
  Synthetic
ggguggaucucgagccaga

SEQ ID NO: 17955 - RNA, 19 nt, Artificial Sequence
  Synthetic
aggaagcgccaaagggcua

SEQ ID NO: 17956 - RNA, 19 nt, Artificial Sequence
  Synthetic
augaagggcuuuccaaaua

SEQ ID NO: 17957 - RNA, 19 nt, Artificial Sequence
  Synthetic
gcaccugugucguccauaa

SEQ ID NO: 17958 - RNA, 19 nt, Artificial Sequence
  Synthetic
gaugcaaagauguguguuu

SEQ ID NO: 17959 - RNA, 19 nt, Artificial Sequence
  Synthetic
gcaaugaacaccagggaaa

SEQ ID NO: 17960 - RNA, 19 nt, Artificial Sequence
  Synthetic
ggaucaaguuggugaagaa

SEQ ID NO: 17961 - RNA, 19 nt, Artificial Sequence
  Synthetic
gguaauaggaagaggaagu

SEQ ID NO: 17962 - RNA, 19 nt, Artificial Sequence
  Synthetic
agaaaucagucuagcauua

SEQ ID NO: 17963 - RNA, 19 nt, Artificial Sequence
  Synthetic
guucauaagaagugccaua

SEQ ID NO: 17964 - RNA, 19 nt, Artificial Sequence
  Synthetic
cgaaauguugauugggaua

SEQ ID NO: 17965 - RNA, 19 nt, Artificial Sequence
  Synthetic
gggauaugauggagcaaaa

SEQ ID NO: 17966 - RNA, 19 nt, Artificial Sequence
  Synthetic
ggauagaugaggaaggaga

SEQ ID NO: 17967 - RNA, 19 nt, Artificial Sequence
  Synthetic
gaagaagccuuuagacuuu

SEQ ID NO: 17968 - RNA, 19 nt, Artificial Sequence
  Synthetic
cuuuagacuuuaugagcua

SEQ ID NO: 17969 - RNA, 19 nt, Artificial Sequence
  Synthetic
uguaaauggaggagaccua

SEQ ID NO: 17970 - RNA, 19 nt, Artificial Sequence
  Synthetic
acgaugacauugugaggaa

SEQ ID NO: 17971 - RNA, 19 nt, Artificial Sequence
  Synthetic
uuacauugcuccugaaauu

SEQ ID NO: 17972 - RNA, 19 nt, Artificial Sequence
  Synthetic
gggaauuugguuuggacaa

SEQ ID NO: 17973 - RNA, 19 nt, Artificial Sequence
  Synthetic
aagaggaaguuaugccaaa

SEQ ID NO: 17974 - RNA, 19 nt, Artificial Sequence
  Synthetic
cuucaagucaugagaguuu

SEQ ID NO: 17975 - RNA, 19 nt, Artificial Sequence
  Synthetic
agucugaauuugaagguuu

SEQ ID NO: 17976 - RNA, 19 nt, Artificial Sequence
  Synthetic
gaggagaagauuaugguuu

SEQ ID NO: 17977 - RNA, 19 nt, Artificial Sequence
  Synthetic
ggauauaagugcaucaacu

SEQ ID NO: 17978 - RNA, 19 nt, Artificial Sequence
  Synthetic
ggaaaguggcaaagcuuca

SEQ ID NO: 17979 - RNA, 19 nt, Artificial Sequence
  Synthetic
gaaacuggacaauguauua

SEQ ID NO: 17980 - RNA, 19 nt, Artificial Sequence
  Synthetic
gccauaaacucgucacaau

SEQ ID NO: 17981 - RNA, 19 nt, Artificial Sequence
  Synthetic
gaaauggauagaugaggaa

SEQ ID NO: 17982 - RNA, 19 nt, Artificial Sequence
  Synthetic
accagaacacagaggauua

SEQ ID NO: 17983 - RNA, 19 nt, Artificial Sequence
  Synthetic
cugaagaacaugccagauu

SEQ ID NO: 17984 - RNA, 19 nt, Artificial Sequence
  Synthetic
uguuaaugaugaugaggau

SEQ ID NO: 17985 - RNA, 19 nt, Artificial Sequence
  Synthetic
cugcaagccuggauacaau

SEQ ID NO: 17986 - RNA, 19 nt, Artificial Sequence
  Synthetic
gagauuugaaacuggacaa

SEQ ID NO: 17987 - RNA, 19 nt, Artificial Sequence
  Synthetic
gcaaacucuugguucauaa

SEQ ID NO: 17988 - RNA, 19 nt, Artificial Sequence
  Synthetic
cagaagaugugaagaaaca

SEQ ID NO: 17989 - RNA, 19 nt, Artificial Sequence
  Synthetic
caggagaaauugacagaau

SEQ ID NO: 17990 - RNA, 19 nt, Artificial Sequence
  Synthetic
ccauugagcugaaggugaa

SEQ ID NO: 17991 - RNA, 19 nt, Artificial Sequence
  Synthetic
cgagagagaugcagaagau

SEQ ID NO: 17992 - RNA, 19 nt, Artificial Sequence
  Synthetic
augcagaagaugugaagaa

SEQ ID NO: 17993 - RNA, 19 nt, Artificial Sequence
  Synthetic
caucaaggcucugaagaaa

SEQ ID NO: 17994 - RNA, 19 nt, Artificial Sequence
  Synthetic
ccaucaaggcucugaagaa

SEQ ID NO: 17995 - RNA, 19 nt, Artificial Sequence
  Synthetic
gcaaggaggguaugggcua

SEQ ID NO: 17996 - RNA, 19 nt, Artificial Sequence
  Synthetic
cagaagagcucgcgggauc

SEQ ID NO: 17997 - RNA, 19 nt, Artificial Sequence
  Synthetic
cgucaagaucgcagacuuu

SEQ ID NO: 17998 - RNA, 19 nt, Artificial Sequence
  Synthetic
agaacaugauccagaccua

SEQ ID NO: 17999 - RNA, 19 nt, Artificial Sequence
  Synthetic
agauguugcaggacaguaa

SEQ ID NO: 18000 - RNA, 19 nt, Artificial Sequence
  Synthetic
uggaggauuucuuggacaa

SEQ ID NO: 18001 - RNA, 19 nt, Artificial Sequence
  Synthetic
cagcagauguugcaggaca

SEQ ID NO: 18002 - RNA, 19 nt, Artificial Sequence
  Synthetic
gagacgagguggagagccu

SEQ ID NO: 18003 - RNA, 19 nt, Artificial Sequence
  Synthetic
gugacauaucgguggagaa

SEQ ID NO: 18004 - RNA, 19 nt, Artificial Sequence
  Synthetic
ccgaccagcuggagaacca

SEQ ID NO: 18005 - RNA, 19 nt, Artificial Sequence
  Synthetic
agaccaagauugacaucau

SEQ ID NO: 18006 - RNA, 19 nt, Artificial Sequence
  Synthetic
gcugggaucuagcgagaga

SEQ ID NO: 18007 - RNA, 19 nt, Artificial Sequence
  Synthetic
ugacagaauccaaccagaa

SEQ ID NO: 18008 - RNA, 19 nt, Artificial Sequence
  Synthetic
agaaauugacagaauccaa

SEQ ID NO: 18009 - RNA, 19 nt, Artificial Sequence
  Synthetic
cagcgaggcccaggagaaa

SEQ ID NO: 18010 - RNA, 19 nt, Artificial Sequence
  Synthetic
cuuuacagccgaagcggaa

SEQ ID NO: 18011 - RNA, 19 nt, Artificial Sequence
  Synthetic
gggcagacgucuuggaagc

SEQ ID NO: 18012 - RNA, 19 nt, Artificial Sequence
  Synthetic
aggcugggaucuagcgaga

SEQ ID NO: 18013 - RNA, 19 nt, Artificial Sequence
  Synthetic
acaguaagaccaagauuga

SEQ ID NO: 18014 - RNA, 19 nt, Artificial Sequence
  Synthetic
aagcagaagccgagaacac

SEQ ID NO: 18015 - RNA, 19 nt, Artificial Sequence
  Synthetic
gcgagagagaugcagaaga

SEQ ID NO: 18016 - RNA, 19 nt, Artificial Sequence
  Synthetic
gcgaggcccaggagaaauu

SEQ ID NO: 18017 - RNA, 19 nt, Artificial Sequence
  Synthetic
aguaagaccaagauugaca

SEQ ID NO: 18018 - RNA, 19 nt, Artificial Sequence
  Synthetic
gcaaagaaggaaugggaua

SEQ ID NO: 18019 - RNA, 19 nt, Artificial Sequence
  Synthetic
cggaagaggagcaggaaau

SEQ ID NO: 18020 - RNA, 19 nt, Artificial Sequence
  Synthetic
gaucgaauuaagagagaaa

SEQ ID NO: 18021 - RNA, 19 nt, Artificial Sequence
  Synthetic
cagcaaagguuucaguuua

SEQ ID NO: 18022 - RNA, 19 nt, Artificial Sequence
  Synthetic
cgagaaagaugcagaggau

SEQ ID NO: 18023 - RNA, 19 nt, Artificial Sequence
  Synthetic
caggaaauguucagagauu

SEQ ID NO: 18024 - RNA, 19 nt, Artificial Sequence
  Synthetic
ggacagaagaucucagcaa

SEQ ID NO: 18025 - RNA, 19 nt, Artificial Sequence
  Synthetic
ggauauggagauagaacaa

SEQ ID NO: 18026 - RNA, 19 nt, Artificial Sequence
  Synthetic
cauaagaggacgagaagau

SEQ ID NO: 18027 - RNA, 19 nt, Artificial Sequence
  Synthetic
gcuagugauucuacaguaa

SEQ ID NO: 18028 - RNA, 19 nt, Artificial Sequence
  Synthetic
ggaaagaacugaaaaucaa

SEQ ID NO: 18029 - RNA, 19 nt, Artificial Sequence
  Synthetic
ccagaaguauuaacagaaa

SEQ ID NO: 18030 - RNA, 19 nt, Artificial Sequence
  Synthetic
ccaagauauccuagagaau

SEQ ID NO: 18031 - RNA, 19 nt, Artificial Sequence
  Synthetic
cgucaaaguaugauaucua

SEQ ID NO: 18032 - RNA, 19 nt, Artificial Sequence
  Synthetic
ggaaugggauauggagaua

SEQ ID NO: 18033 - RNA, 19 nt, Artificial Sequence
  Synthetic
gugcaaagaauguaaugaa

SEQ ID NO: 18034 - RNA, 19 nt, Artificial Sequence
  Synthetic
auacaauggugcagcagaa

SEQ ID NO: 18035 - RNA, 19 nt, Artificial Sequence
  Synthetic
uggccaaacuagcuggaaa

SEQ ID NO: 18036 - RNA, 19 nt, Artificial Sequence
  Synthetic
accaauagcuucugaguuu

SEQ ID NO: 18037 - RNA, 19 nt, Artificial Sequence
  Synthetic
aaaacaaggugcagagaau

SEQ ID NO: 18038 - RNA, 19 nt, Artificial Sequence
  Synthetic
aaucaaagaaggagcugaa

SEQ ID NO: 18039 - RNA, 19 nt, Artificial Sequence
  Synthetic
aggaaagucacaacagaua

SEQ ID NO: 18040 - RNA, 19 nt, Artificial Sequence
  Synthetic
gaaaaguaacagacagaaa

SEQ ID NO: 18041 - RNA, 19 nt, Artificial Sequence
  Synthetic
gcuaguaagaagagcuauu

SEQ ID NO: 18042 - RNA, 19 nt, Artificial Sequence
  Synthetic
gaagaggacauuuuggaaa

SEQ ID NO: 18043 - RNA, 19 nt, Artificial Sequence
  Synthetic
ggauauaccaggacaggau

SEQ ID NO: 18044 - RNA, 19 nt, Artificial Sequence
  Synthetic
ggagauagaacaagcacau

SEQ ID NO: 18045 - RNA, 19 nt, Artificial Sequence
  Synthetic
cggaaguagucgaaaucuu

SEQ ID NO: 18046 - RNA, 19 nt, Artificial Sequence
  Synthetic
gaaagucacaacagauaaa

SEQ ID NO: 18047 - RNA, 19 nt, Artificial Sequence
  Synthetic
agaaagaugcagaggaugu

SEQ ID NO: 18048 - RNA, 19 nt, Artificial Sequence
  Synthetic
cggcaaauguaguguauua

SEQ ID NO: 18049 - RNA, 19 nt, Artificial Sequence
  Synthetic
ccaaaucccuggaaggaaa

SEQ ID NO: 18050 - RNA, 19 nt, Artificial Sequence
  Synthetic
ggugaaacuuugugauuuu

SEQ ID NO: 18051 - RNA, 19 nt, Artificial Sequence
  Synthetic
aggaagagauguagcuauu

SEQ ID NO: 18052 - RNA, 19 nt, Artificial Sequence
  Synthetic
gguaagagacagaauguau

SEQ ID NO: 18053 - RNA, 19 nt, Artificial Sequence
  Synthetic
cgagagaagaggucaaauu

SEQ ID NO: 18054 - RNA, 19 nt, Artificial Sequence
  Synthetic
ccauaagagaugugcauuu

SEQ ID NO: 18055 - RNA, 19 nt, Artificial Sequence
  Synthetic
gugaaagcggccagugaua

SEQ ID NO: 18056 - RNA, 19 nt, Artificial Sequence
  Synthetic
ggucgagagaagaggucaa

SEQ ID NO: 18057 - RNA, 19 nt, Artificial Sequence
  Synthetic
ggucaaauucucaaucaua

SEQ ID NO: 18058 - RNA, 19 nt, Artificial Sequence
  Synthetic
gaagagauguagcuauuaa

SEQ ID NO: 18059 - RNA, 19 nt, Artificial Sequence
  Synthetic
cugaagaaacagaaaugaa

SEQ ID NO: 18060 - RNA, 19 nt, Artificial Sequence
  Synthetic
guuuauuggucgagagaag

SEQ ID NO: 18061 - RNA, 19 nt, Artificial Sequence
  Synthetic
uaucagaccugguuagauu

SEQ ID NO: 18062 - RNA, 19 nt, Artificial Sequence
  Synthetic
gcacaguauaucagauuuu

SEQ ID NO: 18063 - RNA, 19 nt, Artificial Sequence
  Synthetic
auacauacggucagguuua

SEQ ID NO: 18064 - RNA, 19 nt, Artificial Sequence
  Synthetic
caacagaagcauuuguauu

SEQ ID NO: 18065 - RNA, 19 nt, Artificial Sequence
  Synthetic
gaaccaacuugcacagaga

SEQ ID NO: 18066 - RNA, 19 nt, Artificial Sequence
  Synthetic
ggacaucagcacaguauau

SEQ ID NO: 18067 - RNA, 19 nt, Artificial Sequence
  Synthetic
gguccaagaugcagagaug

SEQ ID NO: 18068 - RNA, 19 nt, Artificial Sequence
  Synthetic
gaugacaaugauagugaaa

SEQ ID NO: 18069 - RNA, 19 nt, Artificial Sequence
  Synthetic
ggaauaaaauccuaagaca

SEQ ID NO: 18070 - RNA, 19 nt, Artificial Sequence
  Synthetic
ggucauggaagaagggagu

SEQ ID NO: 18071 - RNA, 19 nt, Artificial Sequence
  Synthetic
aaacacacgaagaggaaaa

SEQ ID NO: 18072 - RNA, 19 nt, Artificial Sequence
  Synthetic
ucuuaaaugugaagggugu

SEQ ID NO: 18073 - RNA, 19 nt, Artificial Sequence
  Synthetic
gcagguacuacaaggaaau

SEQ ID NO: 18074 - RNA, 19 nt, Artificial Sequence
  Synthetic
cauaagagaugugcauuua

SEQ ID NO: 18075 - RNA, 19 nt, Artificial Sequence
  Synthetic
aggaaaacaucguaaaaca

SEQ ID NO: 18076 - RNA, 19 nt, Artificial Sequence
  Synthetic
cugauguggucauggaaga

SEQ ID NO: 18077 - RNA, 19 nt, Artificial Sequence
  Synthetic
ucaaacacacgaagaggaa

SEQ ID NO: 18078 - RNA, 19 nt, Artificial Sequence
  Synthetic
ggacugauauuaagagaaa

SEQ ID NO: 18079 - RNA, 19 nt, Artificial Sequence
  Synthetic
ccaaauccauggagagaaa

SEQ ID NO: 18080 - RNA, 19 nt, Artificial Sequence
  Synthetic
gggaacagauacagauaua

SEQ ID NO: 18081 - RNA, 19 nt, Artificial Sequence
  Synthetic
gguaaugugcagagugaaa

SEQ ID NO: 18082 - RNA, 19 nt, Artificial Sequence
  Synthetic
ggacaaaugauguuacaaa

SEQ ID NO: 18083 - RNA, 19 nt, Artificial Sequence
  Synthetic
agggauaaccugagaaaga

SEQ ID NO: 18084 - RNA, 19 nt, Artificial Sequence
  Synthetic
gcgggaaacugaauaauaa

SEQ ID NO: 18085 - RNA, 19 nt, Artificial Sequence
  Synthetic
ggaaagaucacaaagauuu

SEQ ID NO: 18086 - RNA, 19 nt, Artificial Sequence
  Synthetic
gggaaagaucacaaagauu

SEQ ID NO: 18087 - RNA, 19 nt, Artificial Sequence
  Synthetic
acuggaagcuugauaauaa

SEQ ID NO: 18088 - RNA, 19 nt, Artificial Sequence
  Synthetic
gagccuauuucuaguauaa

SEQ ID NO: 18089 - RNA, 19 nt, Artificial Sequence
  Synthetic
gcaacagcuucuaagauaa

SEQ ID NO: 18090 - RNA, 19 nt, Artificial Sequence
  Synthetic
augugaaggcuguggauua

SEQ ID NO: 18091 - RNA, 19 nt, Artificial Sequence
  Synthetic
ccauaaacgcugugcauca

SEQ ID NO: 18092 - RNA, 19 nt, Artificial Sequence
  Synthetic
ggaaauacaugcauacaca

SEQ ID NO: 18093 - RNA, 19 nt, Artificial Sequence
  Synthetic
ggaagaagauccuuaauca

SEQ ID NO: 18094 - RNA, 19 nt, Artificial Sequence
  Synthetic
gccaaggaaugcaguguaa

SEQ ID NO: 18095 - RNA, 19 nt, Artificial Sequence
  Synthetic
cauuacaccagcagggaua

SEQ ID NO: 18096 - RNA, 19 nt, Artificial Sequence
  Synthetic
cgcccaaucuggauggaaa

SEQ ID NO: 18097 - RNA, 19 nt, Artificial Sequence
  Synthetic
gaagaguacugcuggucua

SEQ ID NO: 18098 - RNA, 19 nt, Artificial Sequence
  Synthetic
guaugaaugcagucaaaua

SEQ ID NO: 18099 - RNA, 19 nt, Artificial Sequence
  Synthetic
ggaaugcaguguaaagauu

SEQ ID NO: 18100 - RNA, 19 nt, Artificial Sequence
  Synthetic
ggauguggcuauuaaagua

SEQ ID NO: 18101 - RNA, 19 nt, Artificial Sequence
  Synthetic
ccacaaaacaagaaaguca

SEQ ID NO: 18102 - RNA, 19 nt, Artificial Sequence
  Synthetic
guuaaaugccuaagaaguu

SEQ ID NO: 18103 - RNA, 19 nt, Artificial Sequence
  Synthetic
ccaaauaacuguaguggag

SEQ ID NO: 18104 - RNA, 19 nt, Artificial Sequence
  Synthetic
gcuaaugaggguuguacaa

SEQ ID NO: 18105 - RNA, 19 nt, Artificial Sequence
  Synthetic
gaugaugcucgcugggaaa

SEQ ID NO: 18106 - RNA, 19 nt, Artificial Sequence
  Synthetic
aaauaacuguaguggagua

SEQ ID NO: 18107 - RNA, 19 nt, Artificial Sequence
  Synthetic
cagaggaaauaaagaaguu

SEQ ID NO: 18108 - RNA, 19 nt, Artificial Sequence
  Synthetic
caauaaaggccuuaaagaa

SEQ ID NO: 18109 - RNA, 19 nt, Artificial Sequence
  Synthetic
gcugagaggugcaggaaga

SEQ ID NO: 18110 - RNA, 19 nt, Artificial Sequence
  Synthetic
acacaaaggacaugaauga

SEQ ID NO: 18111 - RNA, 19 nt, Artificial Sequence
  Synthetic
gggaggaacuugaacggaa

SEQ ID NO: 18112 - RNA, 19 nt, Artificial Sequence
  Synthetic
gcauaaaccagaagcuaau

SEQ ID NO: 18113 - RNA, 19 nt, Artificial Sequence
  Synthetic
cacaagaaguguauugaua

SEQ ID NO: 18114 - RNA, 19 nt, Artificial Sequence
  Synthetic
ggagaugccaagacgaaua

SEQ ID NO: 18115 - RNA, 19 nt, Artificial Sequence
  Synthetic
gcucgcugcuuaagagaua

SEQ ID NO: 18116 - RNA, 19 nt, Artificial Sequence
  Synthetic
cguuggaugagguggauaa

SEQ ID NO: 18117 - RNA, 19 nt, Artificial Sequence
  Synthetic
gaucauugugaaaggcaaa

SEQ ID NO: 18118 - RNA, 19 nt, Artificial Sequence
  Synthetic
ggcauaaaccagaagcuaa

SEQ ID NO: 18119 - RNA, 19 nt, Artificial Sequence
  Synthetic
aaauaugguuagagcugaa

SEQ ID NO: 18120 - RNA, 19 nt, Artificial Sequence
  Synthetic
agaaagaaacacucaacaa

SEQ ID NO: 18121 - RNA, 19 nt, Artificial Sequence
  Synthetic
agacaaagauggacauauc

SEQ ID NO: 18122 - RNA, 19 nt, Artificial Sequence
  Synthetic
ccucaaggccgaaugcuaa

SEQ ID NO: 18123 - RNA, 19 nt, Artificial Sequence
  Synthetic
gaagacagaaauaugguua

SEQ ID NO: 18124 - RNA, 19 nt, Artificial Sequence
  Synthetic
ccauuugacugcagcaauu

SEQ ID NO: 18125 - RNA, 19 nt, Artificial Sequence
  Synthetic
ggaaaggaaguuuuggcaa

SEQ ID NO: 18126 - RNA, 19 nt, Artificial Sequence
  Synthetic
gcagacaaguaaucacuaa

SEQ ID NO: 18127 - RNA, 19 nt, Artificial Sequence
  Synthetic
caacgggaagacagaaaua

SEQ ID NO: 18128 - RNA, 19 nt, Artificial Sequence
  Synthetic
gagaacgggcagauguaua

SEQ ID NO: 18129 - RNA, 19 nt, Artificial Sequence
  Synthetic
gcagauguauauccagaaa

SEQ ID NO: 18130 - RNA, 19 nt, Artificial Sequence
  Synthetic
uggaaaugagugacacaaa

SEQ ID NO: 18131 - RNA, 19 nt, Artificial Sequence
  Synthetic
gcugaaaccucaaggccga

SEQ ID NO: 18132 - RNA, 19 nt, Artificial Sequence
  Synthetic
acaaaggacaugaaugaau

SEQ ID NO: 18133 - RNA, 19 nt, Artificial Sequence
  Synthetic
caaaggacaugaaugaauu

SEQ ID NO: 18134 - RNA, 19 nt, Artificial Sequence
  Synthetic
cgucaaagaguaugucgaa

SEQ ID NO: 18135 - RNA, 19 nt, Artificial Sequence
  Synthetic
ccacaaggagagauucaaa

SEQ ID NO: 18136 - RNA, 19 nt, Artificial Sequence
  Synthetic
gggcagauguauauccaga

SEQ ID NO: 18137 - RNA, 19 nt, Artificial Sequence
  Synthetic
aaagagagccucagggcau

SEQ ID NO: 18138 - RNA, 19 nt, Artificial Sequence
  Synthetic
cugagaagccagagagaga

SEQ ID NO: 18139 - RNA, 19 nt, Artificial Sequence
  Synthetic
ggaagaagucucuggaaga

SEQ ID NO: 18140 - RNA, 19 nt, Artificial Sequence
  Synthetic
ggaagaagaggcugaagaa

SEQ ID NO: 18141 - RNA, 19 nt, Artificial Sequence
  Synthetic
ccacagaggaggaggagga

SEQ ID NO: 18142 - RNA, 19 nt, Artificial Sequence
  Synthetic
aagaagaggcugaagaaga

SEQ ID NO: 18143 - RNA, 19 nt, Artificial Sequence
  Synthetic
aggaggaggaggaggaaga

SEQ ID NO: 18144 - RNA, 19 nt, Artificial Sequence
  Synthetic
gagaagggccguaaggaga

SEQ ID NO: 18145 - RNA, 19 nt, Artificial Sequence
  Synthetic
cugaagaagaggaggagga

SEQ ID NO: 18146 - RNA, 19 nt, Artificial Sequence
  Synthetic
aagaagaggaggaggagga

SEQ ID NO: 18147 - RNA, 19 nt, Artificial Sequence
  Synthetic
gggaaagagaccaugguga

SEQ ID NO: 18148 - RNA, 19 nt, Artificial Sequence
  Synthetic
ccaaagagcagcaccagaa

SEQ ID NO: 18149 - RNA, 19 nt, Artificial Sequence
  Synthetic
gagaacaccugcaaagaga

SEQ ID NO: 18150 - RNA, 19 nt, Artificial Sequence
  Synthetic
gcgcagagaaccucaagaa

SEQ ID NO: 18151 - RNA, 19 nt, Artificial Sequence
  Synthetic
ucaaggagcuggaugauga

SEQ ID NO: 18152 - RNA, 19 nt, Artificial Sequence
  Synthetic
gcaaagagaagggccguaa

SEQ ID NO: 18153 - RNA, 19 nt, Artificial Sequence
  Synthetic
gaaccuggagcaagagauu

SEQ ID NO: 18154 - RNA, 19 nt, Artificial Sequence
  Synthetic
cagaggaggaggaggagga

SEQ ID NO: 18155 - RNA, 19 nt, Artificial Sequence
  Synthetic
gggaagaagucucuggaag

SEQ ID NO: 18156 - RNA, 19 nt, Artificial Sequence
  Synthetic
uggaagaccagguggagau

SEQ ID NO: 18157 - RNA, 19 nt, Artificial Sequence
  Synthetic
aggaggaggaggaagaaga

SEQ ID NO: 18158 - RNA, 19 nt, Artificial Sequence
  Synthetic
aggaagaagaggcugaaga

SEQ ID NO: 18159 - RNA, 19 nt, Artificial Sequence
  Synthetic
aggaggaagaagaggcuga

SEQ ID NO: 18160 - RNA, 19 nt, Artificial Sequence
  Synthetic
cgucugaagaagauccuua

SEQ ID NO: 18161 - RNA, 19 nt, Artificial Sequence
  Synthetic
aggaggaggaggaggagga

SEQ ID NO: 18162 - RNA, 19 nt, Artificial Sequence
  Synthetic
ugucagaagcggaagcuca

SEQ ID NO: 18163 - RNA, 19 nt, Artificial Sequence
  Synthetic
gcgauggaacagacgagua

SEQ ID NO: 18164 - RNA, 19 nt, Artificial Sequence
  Synthetic
agccagagagagaggccaa

SEQ ID NO: 18165 - RNA, 19 nt, Artificial Sequence
  Synthetic
cagugaaggaggaagcuga

SEQ ID NO: 18166 - RNA, 19 nt, Artificial Sequence
  Synthetic
aagaggaggaggaggagga

SEQ ID NO: 18167 - RNA, 19 nt, Artificial Sequence
  Synthetic
aggcugaagaagaggagga

SEQ ID NO: 18168 - RNA, 19 nt, Artificial Sequence
  Synthetic
ccaugaaaguggugaagaa

SEQ ID NO: 18169 - RNA, 19 nt, Artificial Sequence
  Synthetic
agaaagagcuggugcauga

SEQ ID NO: 18170 - RNA, 19 nt, Artificial Sequence
  Synthetic
gggacuugcuggagaagaa

SEQ ID NO: 18171 - RNA, 19 nt, Artificial Sequence
  Synthetic
ugaaaguggugaagaaaga

SEQ ID NO: 18172 - RNA, 19 nt, Artificial Sequence
  Synthetic
guucgaaggcuuugaguau

SEQ ID NO: 18173 - RNA, 19 nt, Artificial Sequence
  Synthetic
gcaaacugcugguccauaa

SEQ ID NO: 18174 - RNA, 19 nt, Artificial Sequence
  Synthetic
agucagaguucgaaggcuu

SEQ ID NO: 18175 - RNA, 19 nt, Artificial Sequence
  Synthetic
acaugaacacagaggacua

SEQ ID NO: 18176 - RNA, 19 nt, Artificial Sequence
  Synthetic
ccgaggagacagauggaau

SEQ ID NO: 18177 - RNA, 19 nt, Artificial Sequence
  Synthetic
ggguacagacagagaagca

SEQ ID NO: 18178 - RNA, 19 nt, Artificial Sequence
  Synthetic
cagagaagcacguguuuga

SEQ ID NO: 18179 - RNA, 19 nt, Artificial Sequence
  Synthetic
gaagaagaaugaccaaauu

SEQ ID NO: 18180 - RNA, 19 nt, Artificial Sequence
  Synthetic
ucgaaggcuuugaguauau

SEQ ID NO: 18181 - RNA, 19 nt, Artificial Sequence
  Synthetic
ugaagaagaaugaccaaau

SEQ ID NO: 18182 - RNA, 19 nt, Artificial Sequence
  Synthetic
cgaggagacagauggaauu

SEQ ID NO: 18183 - RNA, 19 nt, Artificial Sequence
  Synthetic
acaucaagcucacagacua

SEQ ID NO: 18184 - RNA, 19 nt, Artificial Sequence
  Synthetic
ugggauggauggaaucaaa

SEQ ID NO: 18185 - RNA, 19 nt, Artificial Sequence
  Synthetic
cgaggagcucugugaggaa

SEQ ID NO: 18186 - RNA, 19 nt, Artificial Sequence
  Synthetic
aggcaaggcuacaggugca

SEQ ID NO: 18187 - RNA, 19 nt, Artificial Sequence
  Synthetic
caguagacgacaagaacga

SEQ ID NO: 18188 - RNA, 19 nt, Artificial Sequence
  Synthetic
ccgacaacccggacaugaa

SEQ ID NO: 18189 - RNA, 19 nt, Artificial Sequence
  Synthetic
cggaagcaugacagcauua

SEQ ID NO: 18190 - RNA, 19 nt, Artificial Sequence
  Synthetic
acgaugaggaugccauaaa

SEQ ID NO: 18191 - RNA, 19 nt, Artificial Sequence
  Synthetic
caugaaaguggugaagaaa

SEQ ID NO: 18192 - RNA, 19 nt, Artificial Sequence
  Synthetic
ucgaugggauggauggaau

SEQ ID NO: 18193 - RNA, 19 nt, Artificial Sequence
  Synthetic
acacagaggacuaccuuuu

SEQ ID NO: 18194 - RNA, 19 nt, Artificial Sequence
  Synthetic
agacagauggaauugcuua

SEQ ID NO: 18195 - RNA, 19 nt, Artificial Sequence
  Synthetic
ccaaauuuacgccaugaaa

SEQ ID NO: 18196 - RNA, 19 nt, Artificial Sequence
  Synthetic
cagugcagcgagaggauau

SEQ ID NO: 18197 - RNA, 19 nt, Artificial Sequence
  Synthetic
ucugugaggaagugagaga

SEQ ID NO: 18198 - RNA, 19 nt, Artificial Sequence
  Synthetic
ggaagaugggagagcgaua

SEQ ID NO: 18199 - RNA, 19 nt, Artificial Sequence
  Synthetic
gcaaagacugcaaguuuaa

SEQ ID NO: 18200 - RNA, 19 nt, Artificial Sequence
  Synthetic
acaaggacacgcugagaaa

SEQ ID NO: 18201 - RNA, 19 nt, Artificial Sequence
  Synthetic
agaaaguguuuguggugau

SEQ ID NO: 18202 - RNA, 19 nt, Artificial Sequence
  Synthetic
guucgagacgccugagaaa

SEQ ID NO: 18203 - RNA, 19 nt, Artificial Sequence
  Synthetic
gggacauguuggagaugau

SEQ ID NO: 18204 - RNA, 19 nt, Artificial Sequence
  Synthetic
cgacacacgacgcggaaau

SEQ ID NO: 18205 - RNA, 19 nt, Artificial Sequence
  Synthetic
ccauugagcuggacaagau

SEQ ID NO: 18206 - RNA, 19 nt, Artificial Sequence
  Synthetic
caacagauacuauaaggaa

SEQ ID NO: 18207 - RNA, 19 nt, Artificial Sequence
  Synthetic
cuaccaagcaggagagcca

SEQ ID NO: 18208 - RNA, 19 nt, Artificial Sequence
  Synthetic
gcugaagagcugagccgua

SEQ ID NO: 18209 - RNA, 19 nt, Artificial Sequence
  Synthetic
gaaauuccgcugucagaaa

SEQ ID NO: 18210 - RNA, 19 nt, Artificial Sequence
  Synthetic
ucaacgaggaugaggacau

SEQ ID NO: 18211 - RNA, 19 nt, Artificial Sequence
  Synthetic
cagucagauccaagagaau

SEQ ID NO: 18212 - RNA, 19 nt, Artificial Sequence
  Synthetic
ggucagugggcgugaucau

SEQ ID NO: 18213 - RNA, 19 nt, Artificial Sequence
  Synthetic
caucucagcuggagccauu

SEQ ID NO: 18214 - RNA, 19 nt, Artificial Sequence
  Synthetic
ucgugaaccuggagugcau

SEQ ID NO: 18215 - RNA, 19 nt, Artificial Sequence
  Synthetic
cagaacaacacgaccaaca

SEQ ID NO: 18216 - RNA, 19 nt, Artificial Sequence
  Synthetic
cgaccaacagauacuauaa

SEQ ID NO: 18217 - RNA, 19 nt, Artificial Sequence
  Synthetic
gagcugagccguagcacca

SEQ ID NO: 18218 - RNA, 19 nt, Artificial Sequence
  Synthetic
uguuuguggugauggagaa

SEQ ID NO: 18219 - RNA, 19 nt, Artificial Sequence
  Synthetic
aguggucuauggagggaaa

SEQ ID NO: 18220 - RNA, 19 nt, Artificial Sequence
  Synthetic
gcaguuugcagcagagcau

SEQ ID NO: 18221 - RNA, 19 nt, Artificial Sequence
  Synthetic
ggagggaaacaccggaaga

SEQ ID NO: 18222 - RNA, 19 nt, Artificial Sequence
  Synthetic
gugaggaggaggaaggcga

SEQ ID NO: 18223 - RNA, 19 nt, Artificial Sequence
  Synthetic
gagacauccaggagggcga

SEQ ID NO: 18224 - RNA, 19 nt, Artificial Sequence
  Synthetic
acaacacgaccaacagaua

SEQ ID NO: 18225 - RNA, 19 nt, Artificial Sequence
  Synthetic
ggugaagcugugugacuuu

SEQ ID NO: 18226 - RNA, 19 nt, Artificial Sequence
  Synthetic
cauuacagcaacaaggaca

SEQ ID NO: 18227 - RNA, 19 nt, Artificial Sequence
  Synthetic
uccgagagcuggaggggaa

SEQ ID NO: 18228 - RNA, 19 nt, Artificial Sequence
  Synthetic
gaacauggcaggagagaau

SEQ ID NO: 18229 - RNA, 19 nt, Artificial Sequence
  Synthetic
gcaaagagguggcaguuaa

SEQ ID NO: 18230 - RNA, 19 nt, Artificial Sequence
  Synthetic
aagaaggacuuguguaaua

SEQ ID NO: 18231 - RNA, 19 nt, Artificial Sequence
  Synthetic
gugaauuccuccagugaaa

SEQ ID NO: 18232 - RNA, 19 nt, Artificial Sequence
  Synthetic
ccugaaugcucuagaagaa

SEQ ID NO: 18233 - RNA, 19 nt, Artificial Sequence
  Synthetic
gauauguuauggagagaaa

SEQ ID NO: 18234 - RNA, 19 nt, Artificial Sequence
  Synthetic
ccagaaagugagacagaua

SEQ ID NO: 18235 - RNA, 19 nt, Artificial Sequence
  Synthetic
cagaugagaccaagaauaa

SEQ ID NO: 18236 - RNA, 19 nt, Artificial Sequence
  Synthetic
cccuaaagaugaaguguua

SEQ ID NO: 18237 - RNA, 19 nt, Artificial Sequence
  Synthetic
ggaaaucaagagugaguua

SEQ ID NO: 18238 - RNA, 19 nt, Artificial Sequence
  Synthetic
gggacgagguggauaacaa

SEQ ID NO: 18239 - RNA, 19 nt, Artificial Sequence
  Synthetic
acauagagaugaugaaaga

SEQ ID NO: 18240 - RNA, 19 nt, Artificial Sequence
  Synthetic
gauaaugacucccaggaaa

SEQ ID NO: 18241 - RNA, 19 nt, Artificial Sequence
  Synthetic
gcgaauacuuccaggcuuu

SEQ ID NO: 18242 - RNA, 19 nt, Artificial Sequence
  Synthetic
ccacagaagccgagaagga

SEQ ID NO: 18243 - RNA, 19 nt, Artificial Sequence
  Synthetic
caagaggagugaaagguua

SEQ ID NO: 18244 - RNA, 19 nt, Artificial Sequence
  Synthetic
ggucauggauucaagaaau

SEQ ID NO: 18245 - RNA, 19 nt, Artificial Sequence
  Synthetic
aguaagaaaugccaagaaa

SEQ ID NO: 18246 - RNA, 19 nt, Artificial Sequence
  Synthetic
ugaagaaggacuuguguaa

SEQ ID NO: 18247 - RNA, 19 nt, Artificial Sequence
  Synthetic
ggaucuuacacuugaaaua

SEQ ID NO: 18248 - RNA, 19 nt, Artificial Sequence
  Synthetic
guguugaaguccagguuua

SEQ ID NO: 18249 - RNA, 19 nt, Artificial Sequence
  Synthetic
agaaggaaaucaagaguga

SEQ ID NO: 18250 - RNA, 19 nt, Artificial Sequence
  Synthetic
gaaaggagguucuaaacua

SEQ ID NO: 18251 - RNA, 19 nt, Artificial Sequence
  Synthetic
ggacaaggcuagaagaauc

SEQ ID NO: 18252 - RNA, 19 nt, Artificial Sequence
  Synthetic
guacaggcuuuaacagaaa

SEQ ID NO: 18253 - RNA, 19 nt, Artificial Sequence
  Synthetic
ggaagaagcucauuugauu

SEQ ID NO: 18254 - RNA, 19 nt, Artificial Sequence
  Synthetic
cgaaacaauugaagcaaca

SEQ ID NO: 18255 - RNA, 19 nt, Artificial Sequence
  Synthetic
cuacauggugguugagaua

SEQ ID NO: 18256 - RNA, 19 nt, Artificial Sequence
  Synthetic
guucaagucaugagacaua

SEQ ID NO: 18257 - RNA, 19 nt, Artificial Sequence
  Synthetic
aaguggaguuccugagaaa

SEQ ID NO: 18258 - RNA, 19 nt, Artificial Sequence
  Synthetic
gaacaaaggccaugacauu

SEQ ID NO: 18259 - RNA, 19 nt, Artificial Sequence
  Synthetic
ggacaauccaucagaaaga

SEQ ID NO: 18260 - RNA, 19 nt, Artificial Sequence
  Synthetic
agacugguuuggagagaaa

SEQ ID NO: 18261 - RNA, 19 nt, Artificial Sequence
  Synthetic
gguagaagcuuuugccuau

SEQ ID NO: 18262 - RNA, 19 nt, Artificial Sequence
  Synthetic
agaaagcaguacagaggaa

SEQ ID NO: 18263 - RNA, 19 nt, Artificial Sequence
  Synthetic
agaacgagcuggacaagua

SEQ ID NO: 18264 - RNA, 19 nt, Artificial Sequence
  Synthetic
gaaagaaagcccaaaguca

SEQ ID NO: 18265 - RNA, 19 nt, Artificial Sequence
  Synthetic
gcuagaaguuucaugauuu

SEQ ID NO: 18266 - RNA, 19 nt, Artificial Sequence
  Synthetic
cagaaagauuagggaauuu

SEQ ID NO: 18267 - RNA, 19 nt, Artificial Sequence
  Synthetic
gggauugacaugauagaau

SEQ ID NO: 18268 - RNA, 19 nt, Artificial Sequence
  Synthetic
gccagaaacucaagcauuu

SEQ ID NO: 18269 - RNA, 19 nt, Artificial Sequence
  Synthetic
gaacauuuaaggacagcaa

SEQ ID NO: 18270 - RNA, 19 nt, Artificial Sequence
  Synthetic
gaagagacccacuaugaaa

SEQ ID NO: 18271 - RNA, 19 nt, Artificial Sequence
  Synthetic
guauguacccgguggagua

SEQ ID NO: 18272 - RNA, 19 nt, Artificial Sequence
  Synthetic
ucaccgagguuaugccaaa

SEQ ID NO: 18273 - RNA, 19 nt, Artificial Sequence
  Synthetic
augcagaagcuaaagcaaa

SEQ ID NO: 18274 - RNA, 19 nt, Artificial Sequence
  Synthetic
aaagaaagcccaaagucaa

SEQ ID NO: 18275 - RNA, 19 nt, Artificial Sequence
  Synthetic
ccauauacuugucuaacua

SEQ ID NO: 18276 - RNA, 19 nt, Artificial Sequence
  Synthetic
ggauugacaugauagaauu

SEQ ID NO: 18277 - RNA, 19 nt, Artificial Sequence
  Synthetic
gcucagagaagcagaucau

SEQ ID NO: 18278 - RNA, 19 nt, Artificial Sequence
  Synthetic
ugaagaugcagaagcuaaa

SEQ ID NO: 18279 - RNA, 19 nt, Artificial Sequence
  Synthetic
cagagaucauccugaacaa

SEQ ID NO: 18280 - RNA, 19 nt, Artificial Sequence
  Synthetic
gaacuagcuucuugucuua

SEQ ID NO: 18281 - RNA, 19 nt, Artificial Sequence
  Synthetic
gacaaugacuuuaugaaga

SEQ ID NO: 18282 - RNA, 19 nt, Artificial Sequence
  Synthetic
aaacguaauugcugcagaa

SEQ ID NO: 18283 - RNA, 19 nt, Artificial Sequence
  Synthetic
ggaaagaaaacauggacuu

SEQ ID NO: 18284 - RNA, 19 nt, Artificial Sequence
  Synthetic
augaagaugcagaagcuaa

SEQ ID NO: 18285 - RNA, 19 nt, Artificial Sequence
  Synthetic
caucagaaagauuagggaa

SEQ ID NO: 18286 - RNA, 19 nt, Artificial Sequence
  Synthetic
aaacugaggcuuaaaguau

SEQ ID NO: 18287 - RNA, 19 nt, Artificial Sequence
  Synthetic
aaaccaaacuccuguccaa

SEQ ID NO: 18288 - RNA, 19 nt, Artificial Sequence
  Synthetic
gguuauagaucgagaaaca

SEQ ID NO: 18289 - RNA, 19 nt, Artificial Sequence
  Synthetic
ugacagagcuggagagaga

SEQ ID NO: 18290 - RNA, 19 nt, Artificial Sequence
  Synthetic
caacagaaaggcugggaaa

SEQ ID NO: 18291 - RNA, 19 nt, Artificial Sequence
  Synthetic
ggagaauacuuuggagaaa

SEQ ID NO: 18292 - RNA, 19 nt, Artificial Sequence
  Synthetic
cagaggagcuccagaacaa

SEQ ID NO: 18293 - RNA, 19 nt, Artificial Sequence
  Synthetic
gagaugaacaauacagaaa

SEQ ID NO: 18294 - RNA, 19 nt, Artificial Sequence
  Synthetic
ggcacuagaucgagaggua

SEQ ID NO: 18295 - RNA, 19 nt, Artificial Sequence
  Synthetic
uggauaugguucugaguua

SEQ ID NO: 18296 - RNA, 19 nt, Artificial Sequence
  Synthetic
ugacagaagcauuugauua

SEQ ID NO: 18297 - RNA, 19 nt, Artificial Sequence
  Synthetic
cgagaaacauucaaccaaa

SEQ ID NO: 18298 - RNA, 19 nt, Artificial Sequence
  Synthetic
gagagagaguugaggagga

SEQ ID NO: 18299 - RNA, 19 nt, Artificial Sequence
  Synthetic
cgaaaguccuuguuaaaga

SEQ ID NO: 18300 - RNA, 19 nt, Artificial Sequence
  Synthetic
aggcaaaauccaacagaaa

SEQ ID NO: 18301 - RNA, 19 nt, Artificial Sequence
  Synthetic
ggaccuaugaccugaacaa

SEQ ID NO: 18302 - RNA, 19 nt, Artificial Sequence
  Synthetic
cagcaagggaguuacauua

SEQ ID NO: 18303 - RNA, 19 nt, Artificial Sequence
  Synthetic
gcuuggaaguggaauacua

SEQ ID NO: 18304 - RNA, 19 nt, Artificial Sequence
  Synthetic
gguauuaucuacagagacu

SEQ ID NO: 18305 - RNA, 19 nt, Artificial Sequence
  Synthetic
uggcaaaaggaaagguaaa

SEQ ID NO: 18306 - RNA, 19 nt, Artificial Sequence
  Synthetic
aagaaacacaggugguuaa

SEQ ID NO: 18307 - RNA, 19 nt, Artificial Sequence
  Synthetic
aggagaagguggccagauu

SEQ ID NO: 18308 - RNA, 19 nt, Artificial Sequence
  Synthetic
ugaacaagcugcaggaugu

SEQ ID NO: 18309 - RNA, 19 nt, Artificial Sequence
  Synthetic
caaccaaacugucgguaca

SEQ ID NO: 18310 - RNA, 19 nt, Artificial Sequence
  Synthetic
cagaauauaaugaggagga

SEQ ID NO: 18311 - RNA, 19 nt, Artificial Sequence
  Synthetic
cauuagagagggcgaggaa

SEQ ID NO: 18312 - RNA, 19 nt, Artificial Sequence
  Synthetic
gugguuaaaugaugcuaaa

SEQ ID NO: 18313 - RNA, 19 nt, Artificial Sequence
  Synthetic
gcacagaaggccaugauca

SEQ ID NO: 18314 - RNA, 19 nt, Artificial Sequence
  Synthetic
agaaaagacuccagugaga

SEQ ID NO: 18315 - RNA, 19 nt, Artificial Sequence
  Synthetic
agcccaagcuagagaugaa

SEQ ID NO: 18316 - RNA, 19 nt, Artificial Sequence
  Synthetic
uggaguauauuaagggaca

SEQ ID NO: 18317 - RNA, 19 nt, Artificial Sequence
  Synthetic
ugagaaagcaagagucaga

SEQ ID NO: 18318 - RNA, 19 nt, Artificial Sequence
  Synthetic
caaauuagcuguugagaua

SEQ ID NO: 18319 - RNA, 19 nt, Artificial Sequence
  Synthetic
gaagaaaagcccagagaaa

SEQ ID NO: 18320 - RNA, 19 nt, Artificial Sequence
  Synthetic
gaucaaagaaggaagcaaa

SEQ ID NO: 18321 - RNA, 19 nt, Artificial Sequence
  Synthetic
agaagaaaccucagugaaa

SEQ ID NO: 18322 - RNA, 19 nt, Artificial Sequence
  Synthetic
ccacaugauaggagguuua

SEQ ID NO: 18323 - RNA, 19 nt, Artificial Sequence
  Synthetic
gaucuuaagccaaguaaua

SEQ ID NO: 18324 - RNA, 19 nt, Artificial Sequence
  Synthetic
caagccagcuggagaaaua

SEQ ID NO: 18325 - RNA, 19 nt, Artificial Sequence
  Synthetic
cuacuaaacaggaagcaaa

SEQ ID NO: 18326 - RNA, 19 nt, Artificial Sequence
  Synthetic
cgaacaaggaguaagggaa

SEQ ID NO: 18327 - RNA, 19 nt, Artificial Sequence
  Synthetic
guucaaggucaaagacuaa

SEQ ID NO: 18328 - RNA, 19 nt, Artificial Sequence
  Synthetic
augaauggucucagaaaua

SEQ ID NO: 18329 - RNA, 19 nt, Artificial Sequence
  Synthetic
agaaauggcuggugaucuu

SEQ ID NO: 18330 - RNA, 19 nt, Artificial Sequence
  Synthetic
caaauggaauucugugaua

SEQ ID NO: 18331 - RNA, 19 nt, Artificial Sequence
  Synthetic
gcgagaaacuagacaaagu

SEQ ID NO: 18332 - RNA, 19 nt, Artificial Sequence
  Synthetic
caaaguauacuguggacaa

SEQ ID NO: 18333 - RNA, 19 nt, Artificial Sequence
  Synthetic
ggaaagcgaacaaggagua

SEQ ID NO: 18334 - RNA, 19 nt, Artificial Sequence
  Synthetic
gaaaggaaguggaccucua

SEQ ID NO: 18335 - RNA, 19 nt, Artificial Sequence
  Synthetic
aaguaaaagcauuggcaaa

SEQ ID NO: 18336 - RNA, 19 nt, Artificial Sequence
  Synthetic
aguucaaggucaaagacua

SEQ ID NO: 18337 - RNA, 19 nt, Artificial Sequence
  Synthetic
cagauacaucagagauaaa

SEQ ID NO: 18338 - RNA, 19 nt, Artificial Sequence
  Synthetic
ggcauggauuuuaaagaaa

SEQ ID NO: 18339 - RNA, 19 nt, Artificial Sequence
  Synthetic
acgagaaggcggagcguga

SEQ ID NO: 18340 - RNA, 19 nt, Artificial Sequence
  Synthetic
cgaccuaacacaucugaaa

SEQ ID NO: 18341 - RNA, 19 nt, Artificial Sequence
  Synthetic
uggaggaacuuaauacaua

SEQ ID NO: 18342 - RNA, 19 nt, Artificial Sequence
  Synthetic
guaagggaacuuugcgaua

SEQ ID NO: 18343 - RNA, 19 nt, Artificial Sequence
  Synthetic
uggcauggauuuuaaagaa

SEQ ID NO: 18344 - RNA, 19 nt, Artificial Sequence
  Synthetic
aggcgagaaacuagacaaa

SEQ ID NO: 18345 - RNA, 19 nt, Artificial Sequence
  Synthetic
uguuagagcccuucugaaa

SEQ ID NO: 18346 - RNA, 19 nt, Artificial Sequence
  Synthetic
gcuaauucuugcugaacuu

SEQ ID NO: 18347 - RNA, 19 nt, Artificial Sequence
  Synthetic
gcaaaaugggacagaaaga

SEQ ID NO: 18348 - RNA, 19 nt, Artificial Sequence
  Synthetic
cauaaagacucuagaagaa

SEQ ID NO: 18349 - RNA, 19 nt, Artificial Sequence
  Synthetic
ucgaagagcuggagaccaa

SEQ ID NO: 18350 - RNA, 19 nt, Artificial Sequence
  Synthetic
gcaaagggcacaugaauua

SEQ ID NO: 18351 - RNA, 19 nt, Artificial Sequence
  Synthetic
caacaauuauggugaacaa

SEQ ID NO: 18352 - RNA, 19 nt, Artificial Sequence
  Synthetic
agaagaagcugaaauguua

SEQ ID NO: 18353 - RNA, 19 nt, Artificial Sequence
  Synthetic
gcagagauuuaaagaagaa

SEQ ID NO: 18354 - RNA, 19 nt, Artificial Sequence
  Synthetic
ggaaagaagugcauuguuu

SEQ ID NO: 18355 - RNA, 19 nt, Artificial Sequence
  Synthetic
agucaaagccuuaguaauu

SEQ ID NO: 18356 - RNA, 19 nt, Artificial Sequence
  Synthetic
ccuccaaacuuuagucaua

SEQ ID NO: 18357 - RNA, 19 nt, Artificial Sequence
  Synthetic
ggaucaagugcgagaaauu

SEQ ID NO: 18358 - RNA, 19 nt, Artificial Sequence
  Synthetic
agauguaugaggagaaaua

SEQ ID NO: 18359 - RNA, 19 nt, Artificial Sequence
  Synthetic
agaccaaggccgugggaau

SEQ ID NO: 18360 - RNA, 19 nt, Artificial Sequence
  Synthetic
cugaagaaccugaggcaga

SEQ ID NO: 18361 - RNA, 19 nt, Artificial Sequence
  Synthetic
gguuuaaagugaugaagau

SEQ ID NO: 18362 - RNA, 19 nt, Artificial Sequence
  Synthetic
acccaaagcuccuggaauu

SEQ ID NO: 18363 - RNA, 19 nt, Artificial Sequence
  Synthetic
uaucgaagaugaagacuua

SEQ ID NO: 18364 - RNA, 19 nt, Artificial Sequence
  Synthetic
gcgacgacuacgagauaaa

SEQ ID NO: 18365 - RNA, 19 nt, Artificial Sequence
  Synthetic
gagcaggagugucuaguua

SEQ ID NO: 18366 - RNA, 19 nt, Artificial Sequence
  Synthetic
gguagaauuagcagaggaa

SEQ ID NO: 18367 - RNA, 19 nt, Artificial Sequence
  Synthetic
uagaauuagcagaggaaga

SEQ ID NO: 18368 - RNA, 19 nt, Artificial Sequence
  Synthetic
uaacaaagucugagaggca

SEQ ID NO: 18369 - RNA, 19 nt, Artificial Sequence
  Synthetic
ggaaacaggaguacgggua

SEQ ID NO: 18370 - RNA, 19 nt, Artificial Sequence
  Synthetic
aggaguacggguagaauua

SEQ ID NO: 18371 - RNA, 19 nt, Artificial Sequence
  Synthetic
cugaaaagguuuaaaguga

SEQ ID NO: 18372 - RNA, 19 nt, Artificial Sequence
  Synthetic
ggacaagaucacugacaca

SEQ ID NO: 18373 - RNA, 19 nt, Artificial Sequence
  Synthetic
guguggaaccagaggguga

SEQ ID NO: 18374 - RNA, 19 nt, Artificial Sequence
  Synthetic
agguaugagugauggcaau

SEQ ID NO: 18375 - RNA, 19 nt, Artificial Sequence
  Synthetic
gaaggaaauuauugaagga

SEQ ID NO: 18376 - RNA, 19 nt, Artificial Sequence
  Synthetic
aggcaggagaggaagcaaa

SEQ ID NO: 18377 - RNA, 19 nt, Artificial Sequence
  Synthetic
acauaaagacucuagaaga

SEQ ID NO: 18378 - RNA, 19 nt, Artificial Sequence
  Synthetic
ccaagaaacugaagggaaa

SEQ ID NO: 18379 - RNA, 19 nt, Artificial Sequence
  Synthetic
agggaaagcccaaggacaa

SEQ ID NO: 18380 - RNA, 19 nt, Artificial Sequence
  Synthetic
agacagggaugguggagaa

SEQ ID NO: 18381 - RNA, 19 nt, Artificial Sequence
  Synthetic
aggaaagguacgagaucaa

SEQ ID NO: 18382 - RNA, 19 nt, Artificial Sequence
  Synthetic
ccgaagaggaggaggacga

SEQ ID NO: 18383 - RNA, 19 nt, Artificial Sequence
  Synthetic
gggaagaggugguucauca

SEQ ID NO: 18384 - RNA, 19 nt, Artificial Sequence
  Synthetic
cguauaugguggagcauga

SEQ ID NO: 18385 - RNA, 19 nt, Artificial Sequence
  Synthetic
ggaaaagagcugagugaca

SEQ ID NO: 18386 - RNA, 19 nt, Artificial Sequence
  Synthetic
cuauaagucuaguagcaaa

SEQ ID NO: 18387 - RNA, 19 nt, Artificial Sequence
  Synthetic
gcucgaggaugcugacaua

SEQ ID NO: 18388 - RNA, 19 nt, Artificial Sequence
  Synthetic
ggccaaggcuggacgguuu

SEQ ID NO: 18389 - RNA, 19 nt, Artificial Sequence
  Synthetic
acgucaagaucguggccaa

SEQ ID NO: 18390 - RNA, 19 nt, Artificial Sequence
  Synthetic
gguucaaggaagaggcuga

SEQ ID NO: 18391 - RNA, 19 nt, Artificial Sequence
  Synthetic
gugcagaauaugagggcca

SEQ ID NO: 18392 - RNA, 19 nt, Artificial Sequence
  Synthetic
cccaagaaacugaagggaa

SEQ ID NO: 18393 - RNA, 19 nt, Artificial Sequence
  Synthetic
uggacaaggcagaggacau

SEQ ID NO: 18394 - RNA, 19 nt, Artificial Sequence
  Synthetic
ucaaagaccugcugagcca

SEQ ID NO: 18395 - RNA, 19 nt, Artificial Sequence
  Synthetic
agaaggagcugcagagucu

SEQ ID NO: 18396 - RNA, 19 nt, Artificial Sequence
  Synthetic
gggagaagcaccugaagga

SEQ ID NO: 18397 - RNA, 19 nt, Artificial Sequence
  Synthetic
gagaagcaccugaaggaga

SEQ ID NO: 18398 - RNA, 19 nt, Artificial Sequence
  Synthetic
agauguacgaggagcacua

SEQ ID NO: 18399 - RNA, 19 nt, Artificial Sequence
  Synthetic
caccagauccugagaguga

SEQ ID NO: 18400 - RNA, 19 nt, Artificial Sequence
  Synthetic
ucaccaagcuggagcggca

SEQ ID NO: 18401 - RNA, 19 nt, Artificial Sequence
  Synthetic
ggcaaagaacacagcagua

SEQ ID NO: 18402 - RNA, 19 nt, Artificial Sequence
  Synthetic
cagggacgcugaagacaua

SEQ ID NO: 18403 - RNA, 19 nt, Artificial Sequence
  Synthetic
ccgugaggaaggaggauga

SEQ ID NO: 18404 - RNA, 19 nt, Artificial Sequence
  Synthetic
acaagaugguggagugcca

SEQ ID NO: 18405 - RNA, 19 nt, Artificial Sequence
  Synthetic
cgucugagagagugaccua

SEQ ID NO: 18406 - RNA, 19 nt, Artificial Sequence
  Synthetic
ucaagagccuggacgagaa

SEQ ID NO: 18407 - RNA, 19 nt, Artificial Sequence
  Synthetic
ggacgcacccgaugaaauu

SEQ ID NO: 18408 - RNA, 19 nt, Artificial Sequence
  Synthetic
gcuuaaagagagagagaua

SEQ ID NO: 18409 - RNA, 19 nt, Artificial Sequence
  Synthetic
gaaaguaacuaguggcaua

SEQ ID NO: 18410 - RNA, 19 nt, Artificial Sequence
  Synthetic
cuucaaagauuacgagaaa

SEQ ID NO: 18411 - RNA, 19 nt, Artificial Sequence
  Synthetic
guagaagaauugagagcua

SEQ ID NO: 18412 - RNA, 19 nt, Artificial Sequence
  Synthetic
ccagcaaguuucaggguua

SEQ ID NO: 18413 - RNA, 19 nt, Artificial Sequence
  Synthetic
gauauugacugcugggaaa

SEQ ID NO: 18414 - RNA, 19 nt, Artificial Sequence
  Synthetic
aguaaauguuccagggcaa

SEQ ID NO: 18415 - RNA, 19 nt, Artificial Sequence
  Synthetic
cugaacaaguacagauaaa

SEQ ID NO: 18416 - RNA, 19 nt, Artificial Sequence
  Synthetic
guggaaagucaguggcaaa

SEQ ID NO: 18417 - RNA, 19 nt, Artificial Sequence
  Synthetic
caaaggaagcaguaggaaa

SEQ ID NO: 18418 - RNA, 19 nt, Artificial Sequence
  Synthetic
cauaguugcuacagggaaa

SEQ ID NO: 18419 - RNA, 19 nt, Artificial Sequence
  Synthetic
ggaaucagauggagaaaga

SEQ ID NO: 18420 - RNA, 19 nt, Artificial Sequence
  Synthetic
guagaaaggaagagauuuu

SEQ ID NO: 18421 - RNA, 19 nt, Artificial Sequence
  Synthetic
aaucagaaauagaggauga

SEQ ID NO: 18422 - RNA, 19 nt, Artificial Sequence
  Synthetic
caaauauaccggaaaguaa

SEQ ID NO: 18423 - RNA, 19 nt, Artificial Sequence
  Synthetic
ugacauagaacuaggaaga

SEQ ID NO: 18424 - RNA, 19 nt, Artificial Sequence
  Synthetic
cuggaaagugagaaagaaa

SEQ ID NO: 18425 - RNA, 19 nt, Artificial Sequence
  Synthetic
gguaggaauuucaggaaca

SEQ ID NO: 18426 - RNA, 19 nt, Artificial Sequence
  Synthetic
gaagauaacaggcagauaa

SEQ ID NO: 18427 - RNA, 19 nt, Artificial Sequence
  Synthetic
gaucugaacuguugcuuaa

SEQ ID NO: 18428 - RNA, 19 nt, Artificial Sequence
  Synthetic
ugagaaaccugauggaauu

SEQ ID NO: 18429 - RNA, 19 nt, Artificial Sequence
  Synthetic
auaaagaagacaagagaga

SEQ ID NO: 18430 - RNA, 19 nt, Artificial Sequence
  Synthetic
gggaaacuguagaaaggaa

SEQ ID NO: 18431 - RNA, 19 nt, Artificial Sequence
  Synthetic
gauuggugaucuaggauua

SEQ ID NO: 18432 - RNA, 19 nt, Artificial Sequence
  Synthetic
guugagagguggacaagaa

SEQ ID NO: 18433 - RNA, 19 nt, Artificial Sequence
  Synthetic
gugaagaagccuuuauuaa

SEQ ID NO: 18434 - RNA, 19 nt, Artificial Sequence
  Synthetic
gauaagaaaccgugagacu

SEQ ID NO: 18435 - RNA, 19 nt, Artificial Sequence
  Synthetic
ugacaaaguugccgaauca

SEQ ID NO: 18436 - RNA, 19 nt, Artificial Sequence
  Synthetic
aaauagaggaugaggacuu

SEQ ID NO: 18437 - RNA, 19 nt, Artificial Sequence
  Synthetic
agaacaagcuuaugcucaa

SEQ ID NO: 18438 - RNA, 19 nt, Artificial Sequence
  Synthetic
cagcugagguggagaguga

SEQ ID NO: 18439 - RNA, 19 nt, Artificial Sequence
  Synthetic
cggauaagaacgagagguu

SEQ ID NO: 18440 - RNA, 19 nt, Artificial Sequence
  Synthetic
gggcugagcugcagagucu

SEQ ID NO: 18441 - RNA, 19 nt, Artificial Sequence
  Synthetic
ggagaagggaugggacaaa

SEQ ID NO: 18442 - RNA, 19 nt, Artificial Sequence
  Synthetic
ggaaggagaugaugggaag

SEQ ID NO: 18443 - RNA, 19 nt, Artificial Sequence
  Synthetic
ccgagauguacgaggaaaa

SEQ ID NO: 18444 - RNA, 19 nt, Artificial Sequence
  Synthetic
gggcuggaguugaggagga

SEQ ID NO: 18445 - RNA, 19 nt, Artificial Sequence
  Synthetic
ugaagauacccgaggugaa

SEQ ID NO: 18446 - RNA, 19 nt, Artificial Sequence
  Synthetic
gaguugaggaggaaggaga

SEQ ID NO: 18447 - RNA, 19 nt, Artificial Sequence
  Synthetic
aggaaggagaugaugggaa

SEQ ID NO: 18448 - RNA, 19 nt, Artificial Sequence
  Synthetic
cugaggagccagaggcaga

SEQ ID NO: 18449 - RNA, 19 nt, Artificial Sequence
  Synthetic
acuacagacacuacagaaa

SEQ ID NO: 18450 - RNA, 19 nt, Artificial Sequence
  Synthetic
ggacagcccggaagagauu

SEQ ID NO: 18451 - RNA, 19 nt, Artificial Sequence
  Synthetic
gguggaaacacuacagaca

SEQ ID NO: 18452 - RNA, 19 nt, Artificial Sequence
  Synthetic
cugcguaaagcaagggaau

SEQ ID NO: 18453 - RNA, 19 nt, Artificial Sequence
  Synthetic
cugugaaggcugcggaaga

SEQ ID NO: 18454 - RNA, 19 nt, Artificial Sequence
  Synthetic
gggagaagggaugggacaa

SEQ ID NO: 18455 - RNA, 19 nt, Artificial Sequence
  Synthetic
gaacagaagccauguaucu

SEQ ID NO: 18456 - RNA, 19 nt, Artificial Sequence
  Synthetic
ccagaaugacagagugguu

SEQ ID NO: 18457 - RNA, 19 nt, Artificial Sequence
  Synthetic
ugucagagguggaaacacu

SEQ ID NO: 18458 - RNA, 19 nt, Artificial Sequence
  Synthetic
cauaacagcaagaugguga

SEQ ID NO: 18459 - RNA, 19 nt, Artificial Sequence
  Synthetic
aggaagaaaaggaggacau

SEQ ID NO: 18460 - RNA, 19 nt, Artificial Sequence
  Synthetic
gagaagcugcguaaagcaa

SEQ ID NO: 18461 - RNA, 19 nt, Artificial Sequence
  Synthetic
acagcaagauggugaccuu

SEQ ID NO: 18462 - RNA, 19 nt, Artificial Sequence
  Synthetic
ggacguggcuccuucaaga

SEQ ID NO: 18463 - RNA, 19 nt, Artificial Sequence
  Synthetic
acagagugguugagugcca

SEQ ID NO: 18464 - RNA, 19 nt, Artificial Sequence
  Synthetic
ugggagaagggaugggaca

SEQ ID NO: 18465 - RNA, 19 nt, Artificial Sequence
  Synthetic
guggagacccuguugaaga

SEQ ID NO: 18466 - RNA, 19 nt, Artificial Sequence
  Synthetic
cagaggagguggagaugcu

SEQ ID NO: 18467 - RNA, 19 nt, Artificial Sequence
  Synthetic
caagggaauuggaggcacu

SEQ ID NO: 18468 - RNA, 19 nt, Artificial Sequence
  Synthetic
gagaauaggacauggauau

SEQ ID NO: 18469 - RNA, 19 nt, Artificial Sequence
  Synthetic
gaacaaggcgauuaggaaa

SEQ ID NO: 18470 - RNA, 19 nt, Artificial Sequence
  Synthetic
ccgcagaaggauuuagaaa

SEQ ID NO: 18471 - RNA, 19 nt, Artificial Sequence
  Synthetic
gaagauggauugaagagaa

SEQ ID NO: 18472 - RNA, 19 nt, Artificial Sequence
  Synthetic
gccuaaagcaggagcaaca

SEQ ID NO: 18473 - RNA, 19 nt, Artificial Sequence
  Synthetic
gaaauaaagucacaaccaa

SEQ ID NO: 18474 - RNA, 19 nt, Artificial Sequence
  Synthetic
gaacugauaugcaggaaaa

SEQ ID NO: 18475 - RNA, 19 nt, Artificial Sequence
  Synthetic
ccuaggaguucgagacuga

SEQ ID NO: 18476 - RNA, 19 nt, Artificial Sequence
  Synthetic
aaacuuacccugagaauga

SEQ ID NO: 18477 - RNA, 19 nt, Artificial Sequence
  Synthetic
cuuccaacuucgaaacuua

SEQ ID NO: 18478 - RNA, 19 nt, Artificial Sequence
  Synthetic
acuugaagccagagaacau

SEQ ID NO: 18479 - RNA, 19 nt, Artificial Sequence
  Synthetic
gauuaggaaacaugaagaa

SEQ ID NO: 18480 - RNA, 19 nt, Artificial Sequence
  Synthetic
caugguggcacgugaguua

SEQ ID NO: 18481 - RNA, 19 nt, Artificial Sequence
  Synthetic
agaaacugcucgugguuga

SEQ ID NO: 18482 - RNA, 19 nt, Artificial Sequence
  Synthetic
agaacaaggcgauuaggaa

SEQ ID NO: 18483 - RNA, 19 nt, Artificial Sequence
  Synthetic
ggaaauaaagucacaacca

SEQ ID NO: 18484 - RNA, 19 nt, Artificial Sequence
  Synthetic
ccaagaaucuacaaugaca

SEQ ID NO: 18485 - RNA, 19 nt, Artificial Sequence
  Synthetic
acauuaagcucacggacuu

SEQ ID NO: 18486 - RNA, 19 nt, Artificial Sequence
  Synthetic
ggauagggauggccacauu

SEQ ID NO: 18487 - RNA, 19 nt, Artificial Sequence
  Synthetic
gaaauugugcagugaugua

SEQ ID NO: 18488 - RNA, 19 nt, Artificial Sequence
  Synthetic
ugacagaacaaggcgauua

SEQ ID NO: 18489 - RNA, 19 nt, Artificial Sequence
  Synthetic
gauaaagccaggaaggaaa

SEQ ID NO: 18490 - RNA, 19 nt, Artificial Sequence
  Synthetic
gcucaaaucugcuguguau

SEQ ID NO: 18491 - RNA, 19 nt, Artificial Sequence
  Synthetic
guacauaugcccuaggaaa

SEQ ID NO: 18492 - RNA, 19 nt, Artificial Sequence
  Synthetic
ccgaagucauucagagcaa

SEQ ID NO: 18493 - RNA, 19 nt, Artificial Sequence
  Synthetic
agagaaacauggagaagau

SEQ ID NO: 18494 - RNA, 19 nt, Artificial Sequence
  Synthetic
gugcagugauguaaauaua

SEQ ID NO: 18495 - RNA, 19 nt, Artificial Sequence
  Synthetic
ggaaauggcuaccuauuaa

SEQ ID NO: 18496 - RNA, 19 nt, Artificial Sequence
  Synthetic
ugaaacaucucuugcuaaa

SEQ ID NO: 18497 - RNA, 19 nt, Artificial Sequence
  Synthetic
ggaccauccuggcuggaaa

SEQ ID NO: 18498 - RNA, 19 nt, Artificial Sequence
  Synthetic
gaggaaaauucuuacgaua

SEQ ID NO: 18499 - RNA, 19 nt, Artificial Sequence
  Synthetic
ggaaggaaauaaagucaca

SEQ ID NO: 18500 - RNA, 19 nt, Artificial Sequence
  Synthetic
ggugaaauguggaaauguu

SEQ ID NO: 18501 - RNA, 19 nt, Artificial Sequence
  Synthetic
guaccuguguguauagaaa

SEQ ID NO: 18502 - RNA, 19 nt, Artificial Sequence
  Synthetic
gcaccgacguggagcuaga

SEQ ID NO: 18503 - RNA, 19 nt, Artificial Sequence
  Synthetic
gggaaauggcuaccuauua

SEQ ID NO: 18504 - RNA, 19 nt, Artificial Sequence
  Synthetic
ggacaugucuguucuguau

SEQ ID NO: 18505 - RNA, 19 nt, Artificial Sequence
  Synthetic
gacaacaucugaaggguau

SEQ ID NO: 18506 - RNA, 19 nt, Artificial Sequence
  Synthetic
acacagaccuccaagacuu

SEQ ID NO: 18507 - RNA, 19 nt, Artificial Sequence
  Synthetic
ggaagaaacaggaagauug

SEQ ID NO: 18508 - RNA, 19 nt, Artificial Sequence
  Synthetic
guacaguccuuccuaauaa

SEQ ID NO: 18509 - RNA, 19 nt, Artificial Sequence
  Synthetic
auuugaagccggagaacau

SEQ ID NO: 18510 - RNA, 19 nt, Artificial Sequence
  Synthetic
gcucacggacuuuggguuu

SEQ ID NO: 18511 - RNA, 19 nt, Artificial Sequence
  Synthetic
caacagaagucuaaauccu

SEQ ID NO: 18512 - RNA, 19 nt, Artificial Sequence
  Synthetic
gaaaaugugugcagugaga

SEQ ID NO: 18513 - RNA, 19 nt, Artificial Sequence
  Synthetic
gaaguucuguugaggcuua

SEQ ID NO: 18514 - RNA, 19 nt, Artificial Sequence
  Synthetic
aaacuuacccugagcauga

SEQ ID NO: 18515 - RNA, 19 nt, Artificial Sequence
  Synthetic
ggacaauuguaacugugaa

SEQ ID NO: 18516 - RNA, 19 nt, Artificial Sequence
  Synthetic
agagcaagacccuguauua

SEQ ID NO: 18517 - RNA, 19 nt, Artificial Sequence
  Synthetic
gagcaugccuguagucuca

SEQ ID NO: 18518 - RNA, 19 nt, Artificial Sequence
  Synthetic
acaucaagcucacggacuu

SEQ ID NO: 18519 - RNA, 19 nt, Artificial Sequence
  Synthetic
ccauuaagcuagagcaaga

SEQ ID NO: 18520 - RNA, 19 nt, Artificial Sequence
  Synthetic
gagaagagauugaagcuuu

SEQ ID NO: 18521 - RNA, 19 nt, Artificial Sequence
  Synthetic
uagagaacuuucagugcaa

SEQ ID NO: 18522 - RNA, 19 nt, Artificial Sequence
  Synthetic
cgagaaagacugcaaacau

SEQ ID NO: 18523 - RNA, 19 nt, Artificial Sequence
  Synthetic
ccaacaaacccaacucuaa

SEQ ID NO: 18524 - RNA, 19 nt, Artificial Sequence
  Synthetic
gcugagggccgaagcaaga

SEQ ID NO: 18525 - RNA, 19 nt, Artificial Sequence
  Synthetic
ggaaauaggucuaguacua

SEQ ID NO: 18526 - RNA, 19 nt, Artificial Sequence
  Synthetic
cagaagaagacaaggauaa

SEQ ID NO: 18527 - RNA, 19 nt, Artificial Sequence
  Synthetic
gcauaaacacagaaguaaa

SEQ ID NO: 18528 - RNA, 19 nt, Artificial Sequence
  Synthetic
cuguaaagaucaucagaaa

SEQ ID NO: 18529 - RNA, 19 nt, Artificial Sequence
  Synthetic
aagcagaacucuagcuaua

SEQ ID NO: 18530 - RNA, 19 nt, Artificial Sequence
  Synthetic
aggcaauuguucagaaaua

SEQ ID NO: 18531 - RNA, 19 nt, Artificial Sequence
  Synthetic
gcaaaguaaaggaagauaa

SEQ ID NO: 18532 - RNA, 19 nt, Artificial Sequence
  Synthetic
guagaaaccucguuauuaa

SEQ ID NO: 18533 - RNA, 19 nt, Artificial Sequence
  Synthetic
agugaaugcuccugaauaa

SEQ ID NO: 18534 - RNA, 19 nt, Artificial Sequence
  Synthetic
gaagcaaaguaaaggaaga

SEQ ID NO: 18535 - RNA, 19 nt, Artificial Sequence
  Synthetic
cagugaaagccaagcauaa

SEQ ID NO: 18536 - RNA, 19 nt, Artificial Sequence
  Synthetic
aggugaaguccuagauaaa

SEQ ID NO: 18537 - RNA, 19 nt, Artificial Sequence
  Synthetic
caauggaucucaaaggaaa

SEQ ID NO: 18538 - RNA, 19 nt, Artificial Sequence
  Synthetic
gcaaaagacugguuuaaaa

SEQ ID NO: 18539 - RNA, 19 nt, Artificial Sequence
  Synthetic
ggguauaauucaggauuua

SEQ ID NO: 18540 - RNA, 19 nt, Artificial Sequence
  Synthetic
gaaugaaaguugagcagga

SEQ ID NO: 18541 - RNA, 19 nt, Artificial Sequence
  Synthetic
agacuuugauguagaggaa

SEQ ID NO: 18542 - RNA, 19 nt, Artificial Sequence
  Synthetic
guaaagaucaucagaaaca

SEQ ID NO: 18543 - RNA, 19 nt, Artificial Sequence
  Synthetic
aagcauaaacacagaagua

SEQ ID NO: 18544 - RNA, 19 nt, Artificial Sequence
  Synthetic
acagagagggagaaaguua

SEQ ID NO: 18545 - RNA, 19 nt, Artificial Sequence
  Synthetic
cagacaauauccugguuaa

SEQ ID NO: 18546 - RNA, 19 nt, Artificial Sequence
  Synthetic
ugaagaaaauggagaagua

SEQ ID NO: 18547 - RNA, 19 nt, Artificial Sequence
  Synthetic
agaaaguacaccagcuaaa

SEQ ID NO: 18548 - RNA, 19 nt, Artificial Sequence
  Synthetic
cuaauagaacagagaagaa

SEQ ID NO: 18549 - RNA, 19 nt, Artificial Sequence
  Synthetic
ccugauauguuuacagaau

SEQ ID NO: 18550 - RNA, 19 nt, Artificial Sequence
  Synthetic
gaacagagaagaauccaaa

SEQ ID NO: 18551 - RNA, 19 nt, Artificial Sequence
  Synthetic
cuucacauguugcggauaa

SEQ ID NO: 18552 - RNA, 19 nt, Artificial Sequence
  Synthetic
agaaauggaaauaggucua

SEQ ID NO: 18553 - RNA, 19 nt, Artificial Sequence
  Synthetic
agaucuaagcagagcaaau

SEQ ID NO: 18554 - RNA, 19 nt, Artificial Sequence
  Synthetic
ccucaguagacgugaaaga

SEQ ID NO: 18555 - RNA, 19 nt, Artificial Sequence
  Synthetic
gcauagugcuagugggaga

SEQ ID NO: 18556 - RNA, 19 nt, Artificial Sequence
  Synthetic
cugaaguggauaagggaga

SEQ ID NO: 18557 - RNA, 19 nt, Artificial Sequence
  Synthetic
ucagagugguuguggcgaa

SEQ ID NO: 18558 - RNA, 19 nt, Artificial Sequence
  Synthetic
agaugcugguggagcuaaa

SEQ ID NO: 18559 - RNA, 19 nt, Artificial Sequence
  Synthetic
gggaaaugguggugguuau

SEQ ID NO: 18560 - RNA, 19 nt, Artificial Sequence
  Synthetic
cuaagaauguauagagcua

SEQ ID NO: 18561 - RNA, 19 nt, Artificial Sequence
  Synthetic
ccaacugacuuaaagguaa

SEQ ID NO: 18562 - RNA, 19 nt, Artificial Sequence
  Synthetic
cugcaaaacuuguggccaa

SEQ ID NO: 18563 - RNA, 19 nt, Artificial Sequence
  Synthetic
gcgucaucauccagaguaa

SEQ ID NO: 18564 - RNA, 19 nt, Artificial Sequence
  Synthetic
gcaccaagauucaggucau

SEQ ID NO: 18565 - RNA, 19 nt, Artificial Sequence
  Synthetic
ucaacuagauucaggagua

SEQ ID NO: 18566 - RNA, 19 nt, Artificial Sequence
  Synthetic
cugcaguggauucgggaaa

SEQ ID NO: 18567 - RNA, 19 nt, Artificial Sequence
  Synthetic
cguggaaacuuaagugaga

SEQ ID NO: 18568 - RNA, 19 nt, Artificial Sequence
  Synthetic
aacaggagccagagaaaua

SEQ ID NO: 18569 - RNA, 19 nt, Artificial Sequence
  Synthetic
ccaccaaaguguaugcuau

SEQ ID NO: 18570 - RNA, 19 nt, Artificial Sequence
  Synthetic
gaucaaugccugcaagauu

SEQ ID NO: 18571 - RNA, 19 nt, Artificial Sequence
  Synthetic
gcaagguggucacgaagaa

SEQ ID NO: 18572 - RNA, 19 nt, Artificial Sequence
  Synthetic
auuaaagccuucuguguaa

SEQ ID NO: 18573 - RNA, 19 nt, Artificial Sequence
  Synthetic
ccuaaagccaacugacuua

SEQ ID NO: 18574 - RNA, 19 nt, Artificial Sequence
  Synthetic
caacugacuuaaagguaau

SEQ ID NO: 18575 - RNA, 19 nt, Artificial Sequence
  Synthetic
cgaaugaaguggaccggau

SEQ ID NO: 18576 - RNA, 19 nt, Artificial Sequence
  Synthetic
ggacuuagccacacacaau

SEQ ID NO: 18577 - RNA, 19 nt, Artificial Sequence
  Synthetic
ggaagaaggcgaaugaagu

SEQ ID NO: 18578 - RNA, 19 nt, Artificial Sequence
  Synthetic
ccugcaugcuucucagaua

SEQ ID NO: 18579 - RNA, 19 nt, Artificial Sequence
  Synthetic
cuucucagauacagggauu

SEQ ID NO: 18580 - RNA, 19 nt, Artificial Sequence
  Synthetic
uugauauuccuguggauaa

SEQ ID NO: 18581 - RNA, 19 nt, Artificial Sequence
  Synthetic
caauggaaauucagaccuu

SEQ ID NO: 18582 - RNA, 19 nt, Artificial Sequence
  Synthetic
ccucuaacacuguacuaaa

SEQ ID NO: 18583 - RNA, 19 nt, Artificial Sequence
  Synthetic
ggauauaggaaccugcauu

SEQ ID NO: 18584 - RNA, 19 nt, Artificial Sequence
  Synthetic
gguaaaacccuguauagaa

SEQ ID NO: 18585 - RNA, 19 nt, Artificial Sequence
  Synthetic
ucacgaagaaguucagcaa

SEQ ID NO: 18586 - RNA, 19 nt, Artificial Sequence
  Synthetic
auacagggauucuuugaua

SEQ ID NO: 18587 - RNA, 19 nt, Artificial Sequence
  Synthetic
cgaagcaauccgaaggaca

SEQ ID NO: 18588 - RNA, 19 nt, Artificial Sequence
  Synthetic
aaagagaggaagaaggcga

SEQ ID NO: 18589 - RNA, 19 nt, Artificial Sequence
  Synthetic
agacagagcuaauggauaa

SEQ ID NO: 18590 - RNA, 19 nt, Artificial Sequence
  Synthetic
agauaaagacuguggauau

SEQ ID NO: 18591 - RNA, 19 nt, Artificial Sequence
  Synthetic
ggaagaagacagagcuaau

SEQ ID NO: 18592 - RNA, 19 nt, Artificial Sequence
  Synthetic
gcucugaaguugcaaauaa

SEQ ID NO: 18593 - RNA, 19 nt, Artificial Sequence
  Synthetic
ccagggaaauggagguauu

SEQ ID NO: 18594 - RNA, 19 nt, Artificial Sequence
  Synthetic
ccgcggagauccugaaaga

SEQ ID NO: 18595 - RNA, 19 nt, Artificial Sequence
  Synthetic
cugcaaugucccaagauaa

SEQ ID NO: 18596 - RNA, 19 nt, Artificial Sequence
  Synthetic
agaauuuguucguggccaa

SEQ ID NO: 18597 - RNA, 19 nt, Artificial Sequence
  Synthetic
gcggagauccugaaagaga

SEQ ID NO: 18598 - RNA, 19 nt, Artificial Sequence
  Synthetic
caagagaccaauggagaaa

SEQ ID NO: 18599 - RNA, 19 nt, Artificial Sequence
  Synthetic
uugacgauguggagaguuu

SEQ ID NO: 18600 - RNA, 19 nt, Artificial Sequence
  Synthetic
cagagcaagaugaggaaga

SEQ ID NO: 18601 - RNA, 19 nt, Artificial Sequence
  Synthetic
caguauauccaggaagaaa

SEQ ID NO: 18602 - RNA, 19 nt, Artificial Sequence
  Synthetic
uggagaaacaagaguugaa

SEQ ID NO: 18603 - RNA, 19 nt, Artificial Sequence
  Synthetic
gaaacagccuggaguuaga

SEQ ID NO: 18604 - RNA, 19 nt, Artificial Sequence
  Synthetic
ggacaaccuuagagccuca

SEQ ID NO: 18605 - RNA, 19 nt, Artificial Sequence
  Synthetic
gcugcaaugucccaagaua

SEQ ID NO: 18606 - RNA, 19 nt, Artificial Sequence
  Synthetic
uuguauaucaagagaccaa

SEQ ID NO: 18607 - RNA, 19 nt, Artificial Sequence
  Synthetic
cagagcuaauggauaaaua

SEQ ID NO: 18608 - RNA, 19 nt, Artificial Sequence
  Synthetic
ggaguuaaaggcacauaaa

SEQ ID NO: 18609 - RNA, 19 nt, Artificial Sequence
  Synthetic
gcacggaacuggacaugga

SEQ ID NO: 18610 - RNA, 19 nt, Artificial Sequence
  Synthetic
ucaagagaccaauggagaa

SEQ ID NO: 18611 - RNA, 19 nt, Artificial Sequence
  Synthetic
aaagagaagccaccgauaa

SEQ ID NO: 18612 - RNA, 19 nt, Artificial Sequence
  Synthetic
gccuauaagaucuauguua

SEQ ID NO: 18613 - RNA, 19 nt, Artificial Sequence
  Synthetic
acgaggugguggugacgaa

SEQ ID NO: 18614 - RNA, 19 nt, Artificial Sequence
  Synthetic
caugagugauacaguguuu

SEQ ID NO: 18615 - RNA, 19 nt, Artificial Sequence
  Synthetic
caaagagaagccaccgaua

SEQ ID NO: 18616 - RNA, 19 nt, Artificial Sequence
  Synthetic
ccuacagcaagcagagcaa

SEQ ID NO: 18617 - RNA, 19 nt, Artificial Sequence
  Synthetic
ugcaaugucccaagauaaa

SEQ ID NO: 18618 - RNA, 19 nt, Artificial Sequence
  Synthetic
aaauggagguauugauguu

SEQ ID NO: 18619 - RNA, 19 nt, Artificial Sequence
  Synthetic
gggccaaacuggaaacaua

SEQ ID NO: 18620 - RNA, 19 nt, Artificial Sequence
  Synthetic
gcagagacccugaaggaaa

SEQ ID NO: 18621 - RNA, 19 nt, Artificial Sequence
  Synthetic
cagagaaacaagaguacaa

SEQ ID NO: 18622 - RNA, 19 nt, Artificial Sequence
  Synthetic
ccaagaagguuuugauguu

SEQ ID NO: 18623 - RNA, 19 nt, Artificial Sequence
  Synthetic
uagacaagcauauggaaua

SEQ ID NO: 18624 - RNA, 19 nt, Artificial Sequence
  Synthetic
caauauuccuguugacaau

SEQ ID NO: 18625 - RNA, 19 nt, Artificial Sequence
  Synthetic
aagaagagaucccagauua

SEQ ID NO: 18626 - RNA, 19 nt, Artificial Sequence
  Synthetic
ugggcaaagugcagguuua

SEQ ID NO: 18627 - RNA, 19 nt, Artificial Sequence
  Synthetic
gaaggaaagaggugcauau

SEQ ID NO: 18628 - RNA, 19 nt, Artificial Sequence
  Synthetic
agaaggaaauucagggcuu

SEQ ID NO: 18629 - RNA, 19 nt, Artificial Sequence
  Synthetic
ggaaagaggugcauauaag

SEQ ID NO: 18630 - RNA, 19 nt, Artificial Sequence
  Synthetic
gauuuacaccagaaggaaa

SEQ ID NO: 18631 - RNA, 19 nt, Artificial Sequence
  Synthetic
ggaauuuuguugucagaga

SEQ ID NO: 18632 - RNA, 19 nt, Artificial Sequence
  Synthetic
gaaaccaagaugaacauaa

SEQ ID NO: 18633 - RNA, 19 nt, Artificial Sequence
  Synthetic
gugcaaagcuggucuaacu

SEQ ID NO: 18634 - RNA, 19 nt, Artificial Sequence
  Synthetic
aguacaaauucaagagucu

SEQ ID NO: 18635 - RNA, 19 nt, Artificial Sequence
  Synthetic
augcaguaaucguggccaa

SEQ ID NO: 18636 - RNA, 19 nt, Artificial Sequence
  Synthetic
gggauggauuucacaggaa

SEQ ID NO: 18637 - RNA, 19 nt, Artificial Sequence
  Synthetic
cagcagagacccugaagga

SEQ ID NO: 18638 - RNA, 19 nt, Artificial Sequence
  Synthetic
gcauauaagaucuuuguga

SEQ ID NO: 18639 - RNA, 19 nt, Artificial Sequence
  Synthetic
guauggagcuaucaaagaa

SEQ ID NO: 18640 - RNA, 19 nt, Artificial Sequence
  Synthetic
uaacagagaaacaagagua

SEQ ID NO: 18641 - RNA, 19 nt, Artificial Sequence
  Synthetic
caggaaccuaacagagaaa

SEQ ID NO: 18642 - RNA, 19 nt, Artificial Sequence
  Synthetic
caagaugaacauaaccaaa

SEQ ID NO: 18643 - RNA, 19 nt, Artificial Sequence
  Synthetic
caauacaauuccacaugaa

SEQ ID NO: 18644 - RNA, 19 nt, Artificial Sequence
  Synthetic
ccugggaauugcagugauu

SEQ ID NO: 18645 - RNA, 19 nt, Artificial Sequence
  Synthetic
aggaaagaggugcauauaa

SEQ ID NO: 18646 - RNA, 19 nt, Artificial Sequence
  Synthetic
guugacaauuuaagagcau

SEQ ID NO: 18647 - RNA, 19 nt, Artificial Sequence
  Synthetic
aagcagugcaagaugagaa

SEQ ID NO: 18648 - RNA, 19 nt, Artificial Sequence
  Synthetic
ggccaaacuggaaacauaa

SEQ ID NO: 18649 - RNA, 19 nt, Artificial Sequence
  Synthetic
ggaagcaguuggagagaga

SEQ ID NO: 18650 - RNA, 19 nt, Artificial Sequence
  Synthetic
caacaagcggcgugagcaa

SEQ ID NO: 18651 - RNA, 19 nt, Artificial Sequence
  Synthetic
cuacaaacuucgcaaggaa

SEQ ID NO: 18652 - RNA, 19 nt, Artificial Sequence
  Synthetic
ggaaggaggaugagagucu

SEQ ID NO: 18653 - RNA, 19 nt, Artificial Sequence
  Synthetic
gagccugguugaugaggaa

SEQ ID NO: 18654 - RNA, 19 nt, Artificial Sequence
  Synthetic
ggaggaggaagaagaggaa

SEQ ID NO: 18655 - RNA, 19 nt, Artificial Sequence
  Synthetic
gaagcaguccaaugagaaa

SEQ ID NO: 18656 - RNA, 19 nt, Artificial Sequence
  Synthetic
gcaaggaacagcugaagga

SEQ ID NO: 18657 - RNA, 19 nt, Artificial Sequence
  Synthetic
cgauuagggucgaguguca

SEQ ID NO: 18658 - RNA, 19 nt, Artificial Sequence
  Synthetic
gccaauugcaggaggguuu

SEQ ID NO: 18659 - RNA, 19 nt, Artificial Sequence
  Synthetic
ucacagagguggacagugu

SEQ ID NO: 18660 - RNA, 19 nt, Artificial Sequence
  Synthetic
gagaaugugcaguuauuua

SEQ ID NO: 18661 - RNA, 19 nt, Artificial Sequence
  Synthetic
ggcaggaggcaguggagaa

SEQ ID NO: 18662 - RNA, 19 nt, Artificial Sequence
  Synthetic
cgacuaugccuuagacaca

SEQ ID NO: 18663 - RNA, 19 nt, Artificial Sequence
  Synthetic
cagcuaaguaugacaucaa

SEQ ID NO: 18664 - RNA, 19 nt, Artificial Sequence
  Synthetic
cagaaguccugguccgcaa

SEQ ID NO: 18665 - RNA, 19 nt, Artificial Sequence
  Synthetic
gggccaggguagcuaagua

SEQ ID NO: 18666 - RNA, 19 nt, Artificial Sequence
  Synthetic
ggugaugacugcuugauga

SEQ ID NO: 18667 - RNA, 19 nt, Artificial Sequence
  Synthetic
guagcuaaguacagggcca

SEQ ID NO: 18668 - RNA, 19 nt, Artificial Sequence
  Synthetic
uggagaaugugcaguuauu

SEQ ID NO: 18669 - RNA, 19 nt, Artificial Sequence
  Synthetic
gcccacaguaggugaagaa

SEQ ID NO: 18670 - RNA, 19 nt, Artificial Sequence
  Synthetic
ggguguacauggugaugga

SEQ ID NO: 18671 - RNA, 19 nt, Artificial Sequence
  Synthetic
ggaaacaaaacuaaagaga

SEQ ID NO: 18672 - RNA, 19 nt, Artificial Sequence
  Synthetic
ggauggagaaugugcaguu

SEQ ID NO: 18673 - RNA, 19 nt, Artificial Sequence
  Synthetic
gaugacugcuugaugaaga

SEQ ID NO: 18674 - RNA, 19 nt, Artificial Sequence
  Synthetic
gcacugacuccaagaucau

SEQ ID NO: 18675 - RNA, 19 nt, Artificial Sequence
  Synthetic
acaccaacucaguggacau

SEQ ID NO: 18676 - RNA, 19 nt, Artificial Sequence
  Synthetic
cuaagagugacguguacaa

SEQ ID NO: 18677 - RNA, 19 nt, Artificial Sequence
  Synthetic
cacaguaggugaagaaugu

SEQ ID NO: 18678 - RNA, 19 nt, Artificial Sequence
  Synthetic
cagcuucagccgaguggua

SEQ ID NO: 18679 - RNA, 19 nt, Artificial Sequence
  Synthetic
caguguuggcccugucaaa

SEQ ID NO: 18680 - RNA, 19 nt, Artificial Sequence
  Synthetic
gugaugggcugugggacaa

SEQ ID NO: 18681 - RNA, 19 nt, Artificial Sequence
  Synthetic
cugagaaucugcucuacua

SEQ ID NO: 18682 - RNA, 19 nt, Artificial Sequence
  Synthetic
gugaugacugcuugaugaa

SEQ ID NO: 18683 - RNA, 19 nt, Artificial Sequence
  Synthetic
cguguagagcaccgggcaa

SEQ ID NO: 18684 - RNA, 19 nt, Artificial Sequence
  Synthetic
gaacuuagccauacugugu

SEQ ID NO: 18685 - RNA, 19 nt, Artificial Sequence
  Synthetic
ccaugccguuugaggauga

SEQ ID NO: 18686 - RNA, 19 nt, Artificial Sequence
  Synthetic
ccacaguaggugaagaaug

SEQ ID NO: 18687 - RNA, 19 nt, Artificial Sequence
  Synthetic
caagaaaccuuuugcaaua

SEQ ID NO: 18688 - RNA, 19 nt, Artificial Sequence
  Synthetic
gcagauaacucauaggaau

SEQ ID NO: 18689 - RNA, 19 nt, Artificial Sequence
  Synthetic
guacauagcuccugagguu

SEQ ID NO: 18690 - RNA, 19 nt, Artificial Sequence
  Synthetic
agacaaggcuuuacaggaa

SEQ ID NO: 18691 - RNA, 19 nt, Artificial Sequence
  Synthetic
caagagaaacuuaaggaua

SEQ ID NO: 18692 - RNA, 19 nt, Artificial Sequence
  Synthetic
aggcauauguggagcaaga

SEQ ID NO: 18693 - RNA, 19 nt, Artificial Sequence
  Synthetic
gcgaaggacuuuauagaca

SEQ ID NO: 18694 - RNA, 19 nt, Artificial Sequence
  Synthetic
ggaagauucugaaaggcaa

SEQ ID NO: 18695 - RNA, 19 nt, Artificial Sequence
  Synthetic
gcaauaaaagugauggaaa

SEQ ID NO: 18696 - RNA, 19 nt, Artificial Sequence
  Synthetic
gcagaagaccaccaagaaa

SEQ ID NO: 18697 - RNA, 19 nt, Artificial Sequence
  Synthetic
ucucacaaauccaggcaua

SEQ ID NO: 18698 - RNA, 19 nt, Artificial Sequence
  Synthetic
gggccaagcacgaagguca

SEQ ID NO: 18699 - RNA, 19 nt, Artificial Sequence
  Synthetic
gcugaugggauuagguauu

SEQ ID NO: 18700 - RNA, 19 nt, Artificial Sequence
  Synthetic
cgaaggacuuuauagacaa

SEQ ID NO: 18701 - RNA, 19 nt, Artificial Sequence
  Synthetic
ggugaagagucgaaaauuu

SEQ ID NO: 18702 - RNA, 19 nt, Artificial Sequence
  Synthetic
agacugaggaucaaguuua

SEQ ID NO: 18703 - RNA, 19 nt, Artificial Sequence
  Synthetic
caauaaaagugauggaaac

SEQ ID NO: 18704 - RNA, 19 nt, Artificial Sequence
  Synthetic
gaugguugcugaugggauu

SEQ ID NO: 18705 - RNA, 19 nt, Artificial Sequence
  Synthetic
gcacgaaggucaaaaccaa

SEQ ID NO: 18706 - RNA, 19 nt, Artificial Sequence
  Synthetic
ccaagaaaccuuuugcaau

SEQ ID NO: 18707 - RNA, 19 nt, Artificial Sequence
  Synthetic
gagcagaagaccaccaaga

SEQ ID NO: 18708 - RNA, 19 nt, Artificial Sequence
  Synthetic
gaagauucugaaaggcaaa

SEQ ID NO: 18709 - RNA, 19 nt, Artificial Sequence
  Synthetic
aagagaaacuuaaggauag

SEQ ID NO: 18710 - RNA, 19 nt, Artificial Sequence
  Synthetic
gaaggacuuuauagacaaa

SEQ ID NO: 18711 - RNA, 19 nt, Artificial Sequence
  Synthetic
ggaucaaguuuacauggua

SEQ ID NO: 18712 - RNA, 19 nt, Artificial Sequence
  Synthetic
auauguggagcaagagaaa

SEQ ID NO: 18713 - RNA, 19 nt, Artificial Sequence
  Synthetic
cagcaggguugucagggua

SEQ ID NO: 18714 - RNA, 19 nt, Artificial Sequence
  Synthetic
cugaaaaccucuuauacua

SEQ ID NO: 18715 - RNA, 19 nt, Artificial Sequence
  Synthetic
ggccaagcacgaaggucaa

SEQ ID NO: 18716 - RNA, 19 nt, Artificial Sequence
  Synthetic
ucuuugagacugaggauca

SEQ ID NO: 18717 - RNA, 19 nt, Artificial Sequence
  Synthetic
ggacagcgugagagagaaa

SEQ ID NO: 18718 - RNA, 19 nt, Artificial Sequence
  Synthetic
ggacauugcugcucggaau

SEQ ID NO: 18719 - RNA, 19 nt, Artificial Sequence
  Synthetic
gugaagacaaggacagaaa

SEQ ID NO: 18720 - RNA, 19 nt, Artificial Sequence
  Synthetic
gaggagagcaugaagcaaa

SEQ ID NO: 18721 - RNA, 19 nt, Artificial Sequence
  Synthetic
acaccaaauucgaguacua

SEQ ID NO: 18722 - RNA, 19 nt, Artificial Sequence
  Synthetic
caaccuuaauagagaagaa

SEQ ID NO: 18723 - RNA, 19 nt, Artificial Sequence
  Synthetic
cagaagaaggaaucaguua

SEQ ID NO: 18724 - RNA, 19 nt, Artificial Sequence
  Synthetic
uuauaugaguccagagaau

SEQ ID NO: 18725 - RNA, 19 nt, Artificial Sequence
  Synthetic
ugucagaaacagaugauua

SEQ ID NO: 18726 - RNA, 19 nt, Artificial Sequence
  Synthetic
ccaacaaacauuuagacaa

SEQ ID NO: 18727 - RNA, 19 nt, Artificial Sequence
  Synthetic
gguucaagcuggauuauuu

SEQ ID NO: 18728 - RNA, 19 nt, Artificial Sequence
  Synthetic
ggccaaaacacuaagaaaa

SEQ ID NO: 18729 - RNA, 19 nt, Artificial Sequence
  Synthetic
ugaccaagcaagacugaaa

SEQ ID NO: 18730 - RNA, 19 nt, Artificial Sequence
  Synthetic
caaacugcauugaggagaa

SEQ ID NO: 18731 - RNA, 19 nt, Artificial Sequence
  Synthetic
cuacagauuugauaaggaa

SEQ ID NO: 18732 - RNA, 19 nt, Artificial Sequence
  Synthetic
gaauauggcugaccuaaua

SEQ ID NO: 18733 - RNA, 19 nt, Artificial Sequence
  Synthetic
augauaagguguacgagaa

SEQ ID NO: 18734 - RNA, 19 nt, Artificial Sequence
  Synthetic
ggaacuagcuguagaacac

SEQ ID NO: 18735 - RNA, 19 nt, Artificial Sequence
  Synthetic
ccuaagaguuuacuggauu

SEQ ID NO: 18736 - RNA, 19 nt, Artificial Sequence
  Synthetic
agaagauaguggacaguca

SEQ ID NO: 18737 - RNA, 19 nt, Artificial Sequence
  Synthetic
gcgucuaauccgacagcaa

SEQ ID NO: 18738 - RNA, 19 nt, Artificial Sequence
  Synthetic
caacaggugaagagcgauu

SEQ ID NO: 18739 - RNA, 19 nt, Artificial Sequence
  Synthetic
aggaaauggaagaagauca

SEQ ID NO: 18740 - RNA, 19 nt, Artificial Sequence
  Synthetic
guuggguugucuagaaaua

SEQ ID NO: 18741 - RNA, 19 nt, Artificial Sequence
  Synthetic
ggaaauacaguuuggaucu

SEQ ID NO: 18742 - RNA, 19 nt, Artificial Sequence
  Synthetic
ggucgaaugauaaggugua

SEQ ID NO: 18743 - RNA, 19 nt, Artificial Sequence
  Synthetic
uauaucagccuguggguaa

SEQ ID NO: 18744 - RNA, 19 nt, Artificial Sequence
  Synthetic
auuaggagacuuuggauua

SEQ ID NO: 18745 - RNA, 19 nt, Artificial Sequence
  Synthetic
ggacagaaaaggaaugcua

SEQ ID NO: 18746 - RNA, 19 nt, Artificial Sequence
  Synthetic
cagagcuccucaagaauaa

SEQ ID NO: 18747 - RNA, 19 nt, Artificial Sequence
  Synthetic
gggaagaagcagagagaug

SEQ ID NO: 18748 - RNA, 19 nt, Artificial Sequence
  Synthetic
ggacagagaucgagggcac

SEQ ID NO: 18749 - RNA, 19 nt, Artificial Sequence
  Synthetic
ccauggagcaagagaggaa

SEQ ID NO: 18750 - RNA, 19 nt, Artificial Sequence
  Synthetic
gcaauaugagccaggguua

SEQ ID NO: 18751 - RNA, 19 nt, Artificial Sequence
  Synthetic
uagcagaggcugagaacau

SEQ ID NO: 18752 - RNA, 19 nt, Artificial Sequence
  Synthetic
uggcagagcucaucaacaa

SEQ ID NO: 18753 - RNA, 19 nt, Artificial Sequence
  Synthetic
acauugaggacgaggacua

SEQ ID NO: 18754 - RNA, 19 nt, Artificial Sequence
  Synthetic
aggcagugaucaugaagaa

SEQ ID NO: 18755 - RNA, 19 nt, Artificial Sequence
  Synthetic
ugucaagaccugcaagaaa

SEQ ID NO: 18756 - RNA, 19 nt, Artificial Sequence
  Synthetic
gggcuuguuugaagagcaa

SEQ ID NO: 18757 - RNA, 19 nt, Artificial Sequence
  Synthetic
auucaaggauggaacauua

SEQ ID NO: 18758 - RNA, 19 nt, Artificial Sequence
  Synthetic
cagagaaggaggucggcua

SEQ ID NO: 18759 - RNA, 19 nt, Artificial Sequence
  Synthetic
uauaagagauccuugcaaa

SEQ ID NO: 18760 - RNA, 19 nt, Artificial Sequence
  Synthetic
caaagcagaugcaggagaa

SEQ ID NO: 18761 - RNA, 19 nt, Artificial Sequence
  Synthetic
gcuacguggugguggugaa

SEQ ID NO: 18762 - RNA, 19 nt, Artificial Sequence
  Synthetic
ugggugaggugcaggacaa

SEQ ID NO: 18763 - RNA, 19 nt, Artificial Sequence
  Synthetic
agcagaugguggaggacua

SEQ ID NO: 18764 - RNA, 19 nt, Artificial Sequence
  Synthetic
aggagaaguucaugagcga

SEQ ID NO: 18765 - RNA, 19 nt, Artificial Sequence
  Synthetic
cagcuucaauccugggaaa

SEQ ID NO: 18766 - RNA, 19 nt, Artificial Sequence
  Synthetic
ggcaaauccuggacaaaca

SEQ ID NO: 18767 - RNA, 19 nt, Artificial Sequence
  Synthetic
uggccuaccuggagagcau

SEQ ID NO: 18768 - RNA, 19 nt, Artificial Sequence
  Synthetic
uaggaaagauggugagaag

SEQ ID NO: 18769 - RNA, 19 nt, Artificial Sequence
  Synthetic
gcagaacugaauaggacua

SEQ ID NO: 18770 - RNA, 19 nt, Artificial Sequence
  Synthetic
gaacauggcugaccucaua

SEQ ID NO: 18771 - RNA, 19 nt, Artificial Sequence
  Synthetic
ccacugugauuguaaguuu

SEQ ID NO: 18772 - RNA, 19 nt, Artificial Sequence
  Synthetic
ggacgaggacuauuacaaa

SEQ ID NO: 18773 - RNA, 19 nt, Artificial Sequence
  Synthetic
acguggugguggugaagaa

SEQ ID NO: 18774 - RNA, 19 nt, Artificial Sequence
  Synthetic
gccacuaccuggagcggaa

SEQ ID NO: 18775 - RNA, 19 nt, Artificial Sequence
  Synthetic
ggacauggcaggccgauuu

SEQ ID NO: 18776 - RNA, 19 nt, Artificial Sequence
  Synthetic
gggcugaggcugaagcaca

SEQ ID NO: 18777 - RNA, 19 nt, Artificial Sequence
  Synthetic
gcuuauugguuuugguuuu

SEQ ID NO: 18778 - RNA, 19 nt, Artificial Sequence
  Synthetic
ccgcgacucugaugagaaa

SEQ ID NO: 18779 - RNA, 19 nt, Artificial Sequence
  Synthetic
cauccaugguuaagucaua

SEQ ID NO: 18780 - RNA, 19 nt, Artificial Sequence
  Synthetic
ucacggagcucauggccaa

SEQ ID NO: 18781 - RNA, 19 nt, Artificial Sequence
  Synthetic
ggugaugggugcaggaaag

SEQ ID NO: 18782 - RNA, 19 nt, Artificial Sequence
  Synthetic
ugcccgagcuugugaacua

SEQ ID NO: 18783 - RNA, 19 nt, Artificial Sequence
  Synthetic
ggccauuacuccaccaaau

SEQ ID NO: 18784 - RNA, 19 nt, Artificial Sequence
  Synthetic
ugaagaagcugcggcacaa

SEQ ID NO: 18785 - RNA, 19 nt, Artificial Sequence
  Synthetic
uggcugagggcauguguua

SEQ ID NO: 18786 - RNA, 19 nt, Artificial Sequence
  Synthetic
gguuuugacucaccugaaa

SEQ ID NO: 18787 - RNA, 19 nt, Artificial Sequence
  Synthetic
caggaaagguucacaaaug

SEQ ID NO: 18788 - RNA, 19 nt, Artificial Sequence
  Synthetic
ggguccagguggccauuaa

SEQ ID NO: 18789 - RNA, 19 nt, Artificial Sequence
  Synthetic
ggugauuucucgagacaac

SEQ ID NO: 18790 - RNA, 19 nt, Artificial Sequence
  Synthetic
gagacaaccuccugcacca

SEQ ID NO: 18791 - RNA, 19 nt, Artificial Sequence
  Synthetic
augaagaagcugcggcaca

SEQ ID NO: 18792 - RNA, 19 nt, Artificial Sequence
  Synthetic
cgucugguccuuugggauu

SEQ ID NO: 18793 - RNA, 19 nt, Artificial Sequence
  Synthetic
agucggagauccaggccau

SEQ ID NO: 18794 - RNA, 19 nt, Artificial Sequence
  Synthetic
accuggagucgcagaauua

SEQ ID NO: 18795 - RNA, 19 nt, Artificial Sequence
  Synthetic
agauccaggccaugaagaa

SEQ ID NO: 18796 - RNA, 19 nt, Artificial Sequence
  Synthetic
cgacagagcgagacuccau

SEQ ID NO: 18797 - RNA, 19 nt, Artificial Sequence
  Synthetic
ggaaaacacccucugcaaa

SEQ ID NO: 18798 - RNA, 19 nt, Artificial Sequence
  Synthetic
uuucggagcugcuggacau

SEQ ID NO: 18799 - RNA, 19 nt, Artificial Sequence
  Synthetic
gagaaaguccugcccguuu

SEQ ID NO: 18800 - RNA, 19 nt, Artificial Sequence
  Synthetic
gggaaaacacccucugcaa

SEQ ID NO: 18801 - RNA, 19 nt, Artificial Sequence
  Synthetic
gugcacaagcugaugcuga

SEQ ID NO: 18802 - RNA, 19 nt, Artificial Sequence
  Synthetic
gcucauguaaauuugguuu

SEQ ID NO: 18803 - RNA, 19 nt, Artificial Sequence
  Synthetic
ucuugugucuugagagcuu

SEQ ID NO: 18804 - RNA, 19 nt, Artificial Sequence
  Synthetic
gcagcagacuggugugaac

SEQ ID NO: 18805 - RNA, 19 nt, Artificial Sequence
  Synthetic
uuaucaaggaggacgucua

SEQ ID NO: 18806 - RNA, 19 nt, Artificial Sequence
  Synthetic
ucucuuucauccaugguua

SEQ ID NO: 18807 - RNA, 19 nt, Artificial Sequence
  Synthetic
cagcagagauccaagaaga

SEQ ID NO: 18808 - RNA, 19 nt, Artificial Sequence
  Synthetic
acuacauggugcuggaaua

SEQ ID NO: 18809 - RNA, 19 nt, Artificial Sequence
  Synthetic
gggagguguuccuggcaaa

SEQ ID NO: 18810 - RNA, 19 nt, Artificial Sequence
  Synthetic
ccgcagagccacaguguuu

SEQ ID NO: 18811 - RNA, 19 nt, Artificial Sequence
  Synthetic
ugaagagccugcagagcaa

SEQ ID NO: 18812 - RNA, 19 nt, Artificial Sequence
  Synthetic
cgagagaagcccacuauua

SEQ ID NO: 18813 - RNA, 19 nt, Artificial Sequence
  Synthetic
uagcagagauugaagacau

SEQ ID NO: 18814 - RNA, 19 nt, Artificial Sequence
  Synthetic
ggagggaguuggagauguu

SEQ ID NO: 18815 - RNA, 19 nt, Artificial Sequence
  Synthetic
ggaugaugucacuggagaa

SEQ ID NO: 18816 - RNA, 19 nt, Artificial Sequence
  Synthetic
gagagaagcccacuauuaa

SEQ ID NO: 18817 - RNA, 19 nt, Artificial Sequence
  Synthetic
cgccacagcacaagugaua

SEQ ID NO: 18818 - RNA, 19 nt, Artificial Sequence
  Synthetic
ugaugucacuggagaagaa

SEQ ID NO: 18819 - RNA, 19 nt, Artificial Sequence
  Synthetic
aggccauccuggaggguga

SEQ ID NO: 18820 - RNA, 19 nt, Artificial Sequence
  Synthetic
gcgaggagccagagaugga

SEQ ID NO: 18821 - RNA, 19 nt, Artificial Sequence
  Synthetic
gcauggaguuugacaagga

SEQ ID NO: 18822 - RNA, 19 nt, Artificial Sequence
  Synthetic
ucaacagcguggaggugua

SEQ ID NO: 18823 - RNA, 19 nt, Artificial Sequence
  Synthetic
gcaggcagaugaugaagua

SEQ ID NO: 18824 - RNA, 19 nt, Artificial Sequence
  Synthetic
caauauugcugaaagugau

SEQ ID NO: 18825 - RNA, 19 nt, Artificial Sequence
  Synthetic
ccaauauugcugaaaguga

SEQ ID NO: 18826 - RNA, 19 nt, Artificial Sequence
  Synthetic
ccuucaaaguggaaccaga

SEQ ID NO: 18827 - RNA, 19 nt, Artificial Sequence
  Synthetic
ggccaauauugcugaaagu

SEQ ID NO: 18828 - RNA, 19 nt, Artificial Sequence
  Synthetic
ucagcaaggauguguacaa

SEQ ID NO: 18829 - RNA, 19 nt, Artificial Sequence
  Synthetic
aggacuuggcugcgcguaa

SEQ ID NO: 18830 - RNA, 19 nt, Artificial Sequence
  Synthetic
gcacaagugauaagaugca

SEQ ID NO: 18831 - RNA, 19 nt, Artificial Sequence
  Synthetic
ccucggaagcugagaucca

SEQ ID NO: 18832 - RNA, 19 nt, Artificial Sequence
  Synthetic
acacaggguuaaugagucu

SEQ ID NO: 18833 - RNA, 19 nt, Artificial Sequence
  Synthetic
acaagaugauccagaccau

SEQ ID NO: 18834 - RNA, 19 nt, Artificial Sequence
  Synthetic
gagcauagugggcuguauu

SEQ ID NO: 18835 - RNA, 19 nt, Artificial Sequence
  Synthetic
augaugaaguacuggcaga

SEQ ID NO: 18836 - RNA, 19 nt, Artificial Sequence
  Synthetic
gggaugaugucacuggaga

SEQ ID NO: 18837 - RNA, 19 nt, Artificial Sequence
  Synthetic
gcuagaaauuguagaaaga

SEQ ID NO: 18838 - RNA, 19 nt, Artificial Sequence
  Synthetic
guuacaaccuagagagauu

SEQ ID NO: 18839 - RNA, 19 nt, Artificial Sequence
  Synthetic
auaccuagauggugaauaa

SEQ ID NO: 18840 - RNA, 19 nt, Artificial Sequence
  Synthetic
ggaccaggcuagaguauuu

SEQ ID NO: 18841 - RNA, 19 nt, Artificial Sequence
  Synthetic
uuagaaagaucgagauaga

SEQ ID NO: 18842 - RNA, 19 nt, Artificial Sequence
  Synthetic
ggaagaacuacgacagauu

SEQ ID NO: 18843 - RNA, 19 nt, Artificial Sequence
  Synthetic
ccuucagauuccugggaua

SEQ ID NO: 18844 - RNA, 19 nt, Artificial Sequence
  Synthetic
ccacauuaaagaugaagua

SEQ ID NO: 18845 - RNA, 19 nt, Artificial Sequence
  Synthetic
aagaggaauucgaagacua

SEQ ID NO: 18846 - RNA, 19 nt, Artificial Sequence
  Synthetic
agaaaaggguucaacauaa

SEQ ID NO: 18847 - RNA, 19 nt, Artificial Sequence
  Synthetic
ucgaguaaguaaagcauau

SEQ ID NO: 18848 - RNA, 19 nt, Artificial Sequence
  Synthetic
gcaguuggaaauagauaua

SEQ ID NO: 18849 - RNA, 19 nt, Artificial Sequence
  Synthetic
ggauguaauuagaaagauc

SEQ ID NO: 18850 - RNA, 19 nt, Artificial Sequence
  Synthetic
gaaauuuguguucgaguaa

SEQ ID NO: 18851 - RNA, 19 nt, Artificial Sequence
  Synthetic
gccauaacuuugaggcauu

SEQ ID NO: 18852 - RNA, 19 nt, Artificial Sequence
  Synthetic
ugaaauagagggagcuaga

SEQ ID NO: 18853 - RNA, 19 nt, Artificial Sequence
  Synthetic
uguuaaaccugcugcaaga

SEQ ID NO: 18854 - RNA, 19 nt, Artificial Sequence
  Synthetic
caacaaauacagaacugaa

SEQ ID NO: 18855 - RNA, 19 nt, Artificial Sequence
  Synthetic
ggacaaacaaccaugcuau

SEQ ID NO: 18856 - RNA, 19 nt, Artificial Sequence
  Synthetic
gugaagauguuaaagagau

SEQ ID NO: 18857 - RNA, 19 nt, Artificial Sequence
  Synthetic
agaugaaguauuuggaaca

SEQ ID NO: 18858 - RNA, 19 nt, Artificial Sequence
  Synthetic
agaaauuuguguucgagua

SEQ ID NO: 18859 - RNA, 19 nt, Artificial Sequence
  Synthetic
cacccaaauuauugcauua

SEQ ID NO: 18860 - RNA, 19 nt, Artificial Sequence
  Synthetic
ugacaauaauguugcacuu

SEQ ID NO: 18861 - RNA, 19 nt, Artificial Sequence
  Synthetic
ucaaugagguacagacuga

SEQ ID NO: 18862 - RNA, 19 nt, Artificial Sequence
  Synthetic
cucagaaugcccagggaua

SEQ ID NO: 18863 - RNA, 19 nt, Artificial Sequence
  Synthetic
agaaagaucgagauagaca

SEQ ID NO: 18864 - RNA, 19 nt, Artificial Sequence
  Synthetic
cauccaagcaagugaagau

SEQ ID NO: 18865 - RNA, 19 nt, Artificial Sequence
  Synthetic
ccagggauaugaauggaua

SEQ ID NO: 18866 - RNA, 19 nt, Artificial Sequence
  Synthetic
gggcaaauuguguucuuua

SEQ ID NO: 18867 - RNA, 19 nt, Artificial Sequence
  Synthetic
cggaagagcugaaggaauu

SEQ ID NO: 18868 - RNA, 19 nt, Artificial Sequence
  Synthetic
ggguacaagugcagcauca

SEQ ID NO: 18869 - RNA, 19 nt, Artificial Sequence
  Synthetic
agagagagcuccagcagau

SEQ ID NO: 18870 - RNA, 19 nt, Artificial Sequence
  Synthetic
acggaagagcugaaggaau

SEQ ID NO: 18871 - RNA, 19 nt, Artificial Sequence
  Synthetic
agaucaguguggaaagcaa

SEQ ID NO: 18872 - RNA, 19 nt, Artificial Sequence
  Synthetic
agaugaagcuggaccuaga

SEQ ID NO: 18873 - RNA, 19 nt, Artificial Sequence
  Synthetic
uuaacgaggugaagacaga

SEQ ID NO: 18874 - RNA, 19 nt, Artificial Sequence
  Synthetic
ugaaggaauucuuugccaa

SEQ ID NO: 18875 - RNA, 19 nt, Artificial Sequence
  Synthetic
acacagagcccacggaugu

SEQ ID NO: 18876 - RNA, 19 nt, Artificial Sequence
  Synthetic
ccacggaagagcugaagga

SEQ ID NO: 18877 - RNA, 19 nt, Artificial Sequence
  Synthetic
ugaccucggcugagagaga

SEQ ID NO: 18878 - RNA, 19 nt, Artificial Sequence
  Synthetic
gcagcaucaaggagcgaau

SEQ ID NO: 18879 - RNA, 19 nt, Artificial Sequence
  Synthetic
agguugugauugaggacga

SEQ ID NO: 18880 - RNA, 19 nt, Artificial Sequence
  Synthetic
ccauugagcuggugcacac

SEQ ID NO: 18881 - RNA, 19 nt, Artificial Sequence
  Synthetic
cgccaagaaaauugagauu

SEQ ID NO: 18882 - RNA, 19 nt, Artificial Sequence
  Synthetic
gacagagaucaguguggaa

SEQ ID NO: 18883 - RNA, 19 nt, Artificial Sequence
  Synthetic
gcauuaacgaggugaagac

SEQ ID NO: 18884 - RNA, 19 nt, Artificial Sequence
  Synthetic
agucuguaguguucaucua

SEQ ID NO: 18885 - RNA, 19 nt, Artificial Sequence
  Synthetic
acagagaucaguguggaaa

SEQ ID NO: 18886 - RNA, 19 nt, Artificial Sequence
  Synthetic
uccagcagcucaagcagaa

SEQ ID NO: 18887 - RNA, 19 nt, Artificial Sequence
  Synthetic
ccuugagucuguaguguuc

SEQ ID NO: 18888 - RNA, 19 nt, Artificial Sequence
  Synthetic
ccgcugggaucaggacuau

SEQ ID NO: 18889 - RNA, 19 nt, Artificial Sequence
  Synthetic
gcucugugcggcucaucaa

SEQ ID NO: 18890 - RNA, 19 nt, Artificial Sequence
  Synthetic
gcugggaucaggacuauga

SEQ ID NO: 18891 - RNA, 19 nt, Artificial Sequence
  Synthetic
ucgggacugugaaggauga

SEQ ID NO: 18892 - RNA, 19 nt, Artificial Sequence
  Synthetic
gcacagcccagaaaccuuu

SEQ ID NO: 18893 - RNA, 19 nt, Artificial Sequence
  Synthetic
augguugaaugcuguauuu

SEQ ID NO: 18894 - RNA, 19 nt, Artificial Sequence
  Synthetic
cagaaaccuuuggccacaa

SEQ ID NO: 18895 - RNA, 19 nt, Artificial Sequence
  Synthetic
ccaagcaacacgccuucaa

SEQ ID NO: 18896 - RNA, 19 nt, Artificial Sequence
  Synthetic
gcuaccacuucuuccucua

SEQ ID NO: 18897 - RNA, 19 nt, Artificial Sequence
  Synthetic
ggaaagaugcaaagaauaa

SEQ ID NO: 18898 - RNA, 19 nt, Artificial Sequence
  Synthetic
cugcagauguccugaaaua

SEQ ID NO: 18899 - RNA, 19 nt, Artificial Sequence
  Synthetic
gaggaaagaugcaaagaau

SEQ ID NO: 18900 - RNA, 19 nt, Artificial Sequence
  Synthetic
ccucauaagaacagaagaa

SEQ ID NO: 18901 - RNA, 19 nt, Artificial Sequence
  Synthetic
ggaaagaaucgcuauaaua

SEQ ID NO: 18902 - RNA, 19 nt, Artificial Sequence
  Synthetic
caaauaagacaaagggaga

SEQ ID NO: 18903 - RNA, 19 nt, Artificial Sequence
  Synthetic
gcguaugguuugggagaaa

SEQ ID NO: 18904 - RNA, 19 nt, Artificial Sequence
  Synthetic
gaaccaaaugugaggagua

SEQ ID NO: 18905 - RNA, 19 nt, Artificial Sequence
  Synthetic
acucaagacuucaggucaa

SEQ ID NO: 18906 - RNA, 19 nt, Artificial Sequence
  Synthetic
ugaaauugacguugggaau

SEQ ID NO: 18907 - RNA, 19 nt, Artificial Sequence
  Synthetic
ccauagaguucaggacaaa

SEQ ID NO: 18908 - RNA, 19 nt, Artificial Sequence
  Synthetic
ggucaaguucaguggauuu

SEQ ID NO: 18909 - RNA, 19 nt, Artificial Sequence
  Synthetic
uaaucagaguggagaauuu

SEQ ID NO: 18910 - RNA, 19 nt, Artificial Sequence
  Synthetic
aggaaagaugcaaagaaua

SEQ ID NO: 18911 - RNA, 19 nt, Artificial Sequence
  Synthetic
caacgauaguuuaagaaca

SEQ ID NO: 18912 - RNA, 19 nt, Artificial Sequence
  Synthetic
cagcagaauccuuucauaa

SEQ ID NO: 18913 - RNA, 19 nt, Artificial Sequence
  Synthetic
ggcaaugacaucagaaauu

SEQ ID NO: 18914 - RNA, 19 nt, Artificial Sequence
  Synthetic
cuuuaauggugcagacaga

SEQ ID NO: 18915 - RNA, 19 nt, Artificial Sequence
  Synthetic
guaaagcauaagauggaaa

SEQ ID NO: 18916 - RNA, 19 nt, Artificial Sequence
  Synthetic
aggaauaggcaaugagacu

SEQ ID NO: 18917 - RNA, 19 nt, Artificial Sequence
  Synthetic
gccauagaguucaggacaa

SEQ ID NO: 18918 - RNA, 19 nt, Artificial Sequence
  Synthetic
uggagaauuuugaggccua

SEQ ID NO: 18919 - RNA, 19 nt, Artificial Sequence
  Synthetic
gaaauaaccaccaaccaaa

SEQ ID NO: 18920 - RNA, 19 nt, Artificial Sequence
  Synthetic
gaacacaacugcaaugaca

SEQ ID NO: 18921 - RNA, 19 nt, Artificial Sequence
  Synthetic
ugagaauagaggaaagaau

SEQ ID NO: 18922 - RNA, 19 nt, Artificial Sequence
  Synthetic
uuuaagaacaccugaacaa

SEQ ID NO: 18923 - RNA, 19 nt, Artificial Sequence
  Synthetic
cuccaucacuccaggaaua

SEQ ID NO: 18924 - RNA, 19 nt, Artificial Sequence
  Synthetic
ugagaauggcacugaguau

SEQ ID NO: 18925 - RNA, 19 nt, Artificial Sequence
  Synthetic
caucauacacaguggagau

SEQ ID NO: 18926 - RNA, 19 nt, Artificial Sequence
  Synthetic
ccaagcaggcucaggacua

SEQ ID NO: 18927 - RNA, 19 nt, Artificial Sequence
  Synthetic
ggaaaugugucuugauaau

SEQ ID NO: 18928 - RNA, 19 nt, Artificial Sequence
  Synthetic
aagacaagacaaagagaaa

SEQ ID NO: 18929 - RNA, 19 nt, Artificial Sequence
  Synthetic
guaaacaagcugaacauaa

SEQ ID NO: 18930 - RNA, 19 nt, Artificial Sequence
  Synthetic
caaagugaauucauggaaa

SEQ ID NO: 18931 - RNA, 19 nt, Artificial Sequence
  Synthetic
gcaauuaaucagaagaaga

SEQ ID NO: 18932 - RNA, 19 nt, Artificial Sequence
  Synthetic
uggcauggauuguggaaga

SEQ ID NO: 18933 - RNA, 19 nt, Artificial Sequence
  Synthetic
agagagggauauauggaaa

SEQ ID NO: 18934 - RNA, 19 nt, Artificial Sequence
  Synthetic
gcugagggauguuuagaaa

SEQ ID NO: 18935 - RNA, 19 nt, Artificial Sequence
  Synthetic
cauaggacuucaagagaga

SEQ ID NO: 18936 - RNA, 19 nt, Artificial Sequence
  Synthetic
gugcuauacuggccggaaa

SEQ ID NO: 18937 - RNA, 19 nt, Artificial Sequence
  Synthetic
gcugaaagaagaaggaguu

SEQ ID NO: 18938 - RNA, 19 nt, Artificial Sequence
  Synthetic
gagcaaagaaggauuuuau

SEQ ID NO: 18939 - RNA, 19 nt, Artificial Sequence
  Synthetic
gcaccuacauuaaugcuaa

SEQ ID NO: 18940 - RNA, 19 nt, Artificial Sequence
  Synthetic
ggauguagaagaagacaga

SEQ ID NO: 18941 - RNA, 19 nt, Artificial Sequence
  Synthetic
cagcacuguccgaggcaaa

SEQ ID NO: 18942 - RNA, 19 nt, Artificial Sequence
  Synthetic
ccuuaagacaagacaaaga

SEQ ID NO: 18943 - RNA, 19 nt, Artificial Sequence
  Synthetic
cugcauaggagacuaaaua

SEQ ID NO: 18944 - RNA, 19 nt, Artificial Sequence
  Synthetic
gguuaucaguguaaaugaa

SEQ ID NO: 18945 - RNA, 19 nt, Artificial Sequence
  Synthetic
aggaguggcugcagcuuua

SEQ ID NO: 18946 - RNA, 19 nt, Artificial Sequence
  Synthetic
gcugaagacauucguauua

SEQ ID NO: 18947 - RNA, 19 nt, Artificial Sequence
  Synthetic
ccucauggccugaucacaa

SEQ ID NO: 18948 - RNA, 19 nt, Artificial Sequence
  Synthetic
cugcuaaaguugcaaguga

SEQ ID NO: 18949 - RNA, 19 nt, Artificial Sequence
  Synthetic
ggaaagaagaacaguauug

SEQ ID NO: 18950 - RNA, 19 nt, Artificial Sequence
  Synthetic
cccaacaugugaagcauua

SEQ ID NO: 18951 - RNA, 19 nt, Artificial Sequence
  Synthetic
uggaaauaccaaugaacuu

SEQ ID NO: 18952 - RNA, 19 nt, Artificial Sequence
  Synthetic
cuacaguggcaaggagaaa

SEQ ID NO: 18953 - RNA, 19 nt, Artificial Sequence
  Synthetic
gcacuacacugaauggaau

SEQ ID NO: 18954 - RNA, 19 nt, Artificial Sequence
  Synthetic
agaagaggguccaacguau

SEQ ID NO: 18955 - RNA, 19 nt, Artificial Sequence
  Synthetic
ucacaagacuccagacagu

SEQ ID NO: 18956 - RNA, 19 nt, Artificial Sequence
  Synthetic
gcaauggaaggaaggagaa

SEQ ID NO: 18957 - RNA, 19 nt, Artificial Sequence
  Synthetic
ccuuacaucuaucggguua

SEQ ID NO: 18958 - RNA, 19 nt, Artificial Sequence
  Synthetic
ccaaacaacuauuccgcaa

SEQ ID NO: 18959 - RNA, 19 nt, Artificial Sequence
  Synthetic
caaagaauguauagagaag

SEQ ID NO: 18960 - RNA, 19 nt, Artificial Sequence
  Synthetic
ugaaaugacuuauggacga

SEQ ID NO: 18961 - RNA, 19 nt, Artificial Sequence
  Synthetic
uguauagagaagagacuaa

SEQ ID NO: 18962 - RNA, 19 nt, Artificial Sequence
  Synthetic
ugaaaauagugaagagcau

SEQ ID NO: 18963 - RNA, 19 nt, Artificial Sequence
  Synthetic
gguuggagaauaaggaaga

SEQ ID NO: 18964 - RNA, 19 nt, Artificial Sequence
  Synthetic
uaaaagaggcauugagaau

SEQ ID NO: 18965 - RNA, 19 nt, Artificial Sequence
  Synthetic
acuaauugaggaacagaaa

SEQ ID NO: 18966 - RNA, 19 nt, Artificial Sequence
  Synthetic
gaucagaaccaaaguggga

SEQ ID NO: 18967 - RNA, 19 nt, Artificial Sequence
  Synthetic
ggcaaauauuagagguacu

SEQ ID NO: 18968 - RNA, 19 nt, Artificial Sequence
  Synthetic
agagacuaauugaggaaca

SEQ ID NO: 18969 - RNA, 19 nt, Artificial Sequence
  Synthetic
guuagaagauacagugacu

SEQ ID NO: 18970 - RNA, 19 nt, Artificial Sequence
  Synthetic
uaacauggaucgugaauuc

SEQ ID NO: 18971 - RNA, 19 nt, Artificial Sequence
  Synthetic
acggcaaauauuagaggua

SEQ ID NO: 18972 - RNA, 19 nt, Artificial Sequence
  Synthetic
cuaagaagauucagggccu

SEQ ID NO: 18973 - RNA, 19 nt, Artificial Sequence
  Synthetic
ccacugagcuggaggaaua

SEQ ID NO: 18974 - RNA, 19 nt, Artificial Sequence
  Synthetic
gcauugaaguaguggacaa

SEQ ID NO: 18975 - RNA, 19 nt, Artificial Sequence
  Synthetic
ggugaauaccagagaagaa

SEQ ID NO: 18976 - RNA, 19 nt, Artificial Sequence
  Synthetic
ggaauuaugcauugaagua

SEQ ID NO: 18977 - RNA, 19 nt, Artificial Sequence
  Synthetic
ggucagagacauccagaaa

SEQ ID NO: 18978 - RNA, 19 nt, Artificial Sequence
  Synthetic
gagaagaaguugaagaucu

SEQ ID NO: 18979 - RNA, 19 nt, Artificial Sequence
  Synthetic
ccaagagaaucguggugaa

SEQ ID NO: 18980 - RNA, 19 nt, Artificial Sequence
  Synthetic
gggaauggguggcauggaa

SEQ ID NO: 18981 - RNA, 19 nt, Artificial Sequence
  Synthetic
caguaggacuugagggacu

SEQ ID NO: 18982 - RNA, 19 nt, Artificial Sequence
  Synthetic
gcauggaagccaaggugaa

SEQ ID NO: 18983 - RNA, 19 nt, Artificial Sequence
  Synthetic
ccaauuaucuucuaggauu

SEQ ID NO: 18984 - RNA, 19 nt, Artificial Sequence
  Synthetic
agagaaacaccaacugaaa

SEQ ID NO: 18985 - RNA, 19 nt, Artificial Sequence
  Synthetic
gaggaagauacuuugguua

SEQ ID NO: 18986 - RNA, 19 nt, Artificial Sequence
  Synthetic
ggguaaauguuauuagugu

SEQ ID NO: 18987 - RNA, 19 nt, Artificial Sequence
  Synthetic
ccagagaagaaguugaaga

SEQ ID NO: 18988 - RNA, 19 nt, Artificial Sequence
  Synthetic
ugagaguggaacagguaaa

SEQ ID NO: 18989 - RNA, 19 nt, Artificial Sequence
  Synthetic
cagaaccagcugaaagaaa

SEQ ID NO: 18990 - RNA, 19 nt, Artificial Sequence
  Synthetic
cagagaagaaguugaagau

SEQ ID NO: 18991 - RNA, 19 nt, Artificial Sequence
  Synthetic
gaugcaaagcuuauugaua

SEQ ID NO: 18992 - RNA, 19 nt, Artificial Sequence
  Synthetic
gagcagaaauuauccauca

SEQ ID NO: 18993 - RNA, 19 nt, Artificial Sequence
  Synthetic
uaucagugcugcagaauca

SEQ ID NO: 18994 - RNA, 19 nt, Artificial Sequence
  Synthetic
gggaaucaguacaucgaga

SEQ ID NO: 18995 - RNA, 19 nt, Artificial Sequence
  Synthetic
agaaccagcugaaagaaau

SEQ ID NO: 18996 - RNA, 19 nt, Artificial Sequence
  Synthetic
cagaaucagggcagagaga

SEQ ID NO: 18997 - RNA, 19 nt, Artificial Sequence
  Synthetic
cuguugagcagcagggaga

SEQ ID NO: 18998 - RNA, 19 nt, Artificial Sequence
  Synthetic
cagacauuguggaggggaa

SEQ ID NO: 18999 - RNA, 19 nt, Artificial Sequence
  Synthetic
gagcagagagcagaaauua

SEQ ID NO: 19000 - RNA, 19 nt, Artificial Sequence
  Synthetic
agguaucagugcugcagaa

SEQ ID NO: 19001 - RNA, 19 nt, Artificial Sequence
  Synthetic
gaaucagggcagagagaug

SEQ ID NO: 19002 - RNA, 19 nt, Artificial Sequence
  Synthetic
cagcaggagaugcaaguuu

SEQ ID NO: 19003 - RNA, 19 nt, Artificial Sequence
  Synthetic
ggauacagcuggacaagaa

SEQ ID NO: 19004 - RNA, 19 nt, Artificial Sequence
  Synthetic
ugaagaagaggaagagaaa

SEQ ID NO: 19005 - RNA, 19 nt, Artificial Sequence
  Synthetic
gugaagaagaggaagagaa

SEQ ID NO: 19006 - RNA, 19 nt, Artificial Sequence
  Synthetic
ucgagaaacugaaggagaa

SEQ ID NO: 19007 - RNA, 19 nt, Artificial Sequence
  Synthetic
acaagaagauuaugacaga

SEQ ID NO: 19008 - RNA, 19 nt, Artificial Sequence
  Synthetic
aagaagaggaagagaaaau

SEQ ID NO: 19009 - RNA, 19 nt, Artificial Sequence
  Synthetic
aaucugggcuuaugggaua

SEQ ID NO: 19010 - RNA, 19 nt, Artificial Sequence
  Synthetic
ggagauuggugcuguaaaa

SEQ ID NO: 19011 - RNA, 19 nt, Artificial Sequence
  Synthetic
auguuaugguagauggaaa

SEQ ID NO: 19012 - RNA, 19 nt, Artificial Sequence
  Synthetic
ccgcaaacaguuggagaaa

SEQ ID NO: 19013 - RNA, 19 nt, Artificial Sequence
  Synthetic
gauaaagacacgaucgaga

SEQ ID NO: 19014 - RNA, 19 nt, Artificial Sequence
  Synthetic
gaaacguacgguaaggaua

SEQ ID NO: 19015 - RNA, 19 nt, Artificial Sequence
  Synthetic
agaaacugaaggagaagaa

SEQ ID NO: 19016 - RNA, 19 nt, Artificial Sequence
  Synthetic
cagcuggacaagaagauua

SEQ ID NO: 19017 - RNA, 19 nt, Artificial Sequence
  Synthetic
ggacaagaagauuaugaca

SEQ ID NO: 19018 - RNA, 19 nt, Artificial Sequence
  Synthetic
uuggagaaacguacgguaa

SEQ ID NO: 19019 - RNA, 19 nt, Artificial Sequence
  Synthetic
agugugugguggugggaga

SEQ ID NO: 19020 - RNA, 19 nt, Artificial Sequence
  Synthetic
cugccaauguuaugguaga

SEQ ID NO: 19021 - RNA, 19 nt, Artificial Sequence
  Synthetic
gcaaacaguuggagaaacg

SEQ ID NO: 19022 - RNA, 19 nt, Artificial Sequence
  Synthetic
ugacaauuauucugccaau

SEQ ID NO: 19023 - RNA, 19 nt, Artificial Sequence
  Synthetic
aaacguacgguaaggauau

SEQ ID NO: 19024 - RNA, 19 nt, Artificial Sequence
  Synthetic
uguuaugguagauggaaaa

SEQ ID NO: 19025 - RNA, 19 nt, Artificial Sequence
  Synthetic
ccaucauccuagugggaac

SEQ ID NO: 19026 - RNA, 19 nt, Artificial Sequence
  Synthetic
ugaucuuagggaugauaaa

SEQ ID NO: 19027 - RNA, 19 nt, Artificial Sequence
  Synthetic
ugcauuuccuggagaauau

SEQ ID NO: 19028 - RNA, 19 nt, Artificial Sequence
  Synthetic
caaugcauuuccuggagaa

SEQ ID NO: 19029 - RNA, 19 nt, Artificial Sequence
  Synthetic
gggcaaagacaagccgauu

SEQ ID NO: 19030 - RNA, 19 nt, Artificial Sequence
  Synthetic
gagaagaagcugacuccca

SEQ ID NO: 19031 - RNA, 19 nt, Artificial Sequence
  Synthetic
auaaagacacgaucgagaa

SEQ ID NO: 19032 - RNA, 19 nt, Artificial Sequence
  Synthetic
uaaagacacgaucgagaaa

SEQ ID NO: 19033 - RNA, 19 nt, Artificial Sequence
  Synthetic
ugaagaaaguaaaggaaga

SEQ ID NO: 19034 - RNA, 19 nt, Artificial Sequence
  Synthetic
ccacgaacacaaagguaaa

SEQ ID NO: 19035 - RNA, 19 nt, Artificial Sequence
  Synthetic
gcaaagaacaucauccaua

SEQ ID NO: 19036 - RNA, 19 nt, Artificial Sequence
  Synthetic
gcacggagauguugcagua

SEQ ID NO: 19037 - RNA, 19 nt, Artificial Sequence
  Synthetic
gguacaugacaaaggacaa

SEQ ID NO: 19038 - RNA, 19 nt, Artificial Sequence
  Synthetic
cuacaauaguucagcaguu

SEQ ID NO: 19039 - RNA, 19 nt, Artificial Sequence
  Synthetic
cagcaaugguuuuggauuc

SEQ ID NO: 19040 - RNA, 19 nt, Artificial Sequence
  Synthetic
ccucguggacagagagauu

SEQ ID NO: 19041 - RNA, 19 nt, Artificial Sequence
  Synthetic
ggaaauagaagccagugaa

SEQ ID NO: 19042 - RNA, 19 nt, Artificial Sequence
  Synthetic
gaacuguuuauaaggguaa

SEQ ID NO: 19043 - RNA, 19 nt, Artificial Sequence
  Synthetic
gggaaauagaagccaguga

SEQ ID NO: 19044 - RNA, 19 nt, Artificial Sequence
  Synthetic
caugaaggcuuaacaguga

SEQ ID NO: 19045 - RNA, 19 nt, Artificial Sequence
  Synthetic
gacaugaaauccaacaaua

SEQ ID NO: 19046 - RNA, 19 nt, Artificial Sequence
  Synthetic
ggaacuguuuauaagggua

SEQ ID NO: 19047 - RNA, 19 nt, Artificial Sequence
  Synthetic
ucaagcuauuauugggaaa

SEQ ID NO: 19048 - RNA, 19 nt, Artificial Sequence
  Synthetic
agaccaaguuucagauguu

SEQ ID NO: 19049 - RNA, 19 nt, Artificial Sequence
  Synthetic
auucaaagaugccguguuu

SEQ ID NO: 19050 - RNA, 19 nt, Artificial Sequence
  Synthetic
cagagagauucaagcuauu

SEQ ID NO: 19051 - RNA, 19 nt, Artificial Sequence
  Synthetic
acggagauguugcaguaaa

SEQ ID NO: 19052 - RNA, 19 nt, Artificial Sequence
  Synthetic
gcacauaaggcaccaaaca

SEQ ID NO: 19053 - RNA, 19 nt, Artificial Sequence
  Synthetic
acagagagauucaagcuau

SEQ ID NO: 19054 - RNA, 19 nt, Artificial Sequence
  Synthetic
aaguagauuuccuggauca

SEQ ID NO: 19055 - RNA, 19 nt, Artificial Sequence
  Synthetic
ggauguugaugguaguaca

SEQ ID NO: 19056 - RNA, 19 nt, Artificial Sequence
  Synthetic
gcaaagaacaguggucaau

SEQ ID NO: 19057 - RNA, 19 nt, Artificial Sequence
  Synthetic
cauggugggccgaggauau

SEQ ID NO: 19058 - RNA, 19 nt, Artificial Sequence
  Synthetic
ggguaaauggcacggagau

SEQ ID NO: 19059 - RNA, 19 nt, Artificial Sequence
  Synthetic
agcaaagaacaguggucaa

SEQ ID NO: 19060 - RNA, 19 nt, Artificial Sequence
  Synthetic
cuacaaauuucaugagcac

SEQ ID NO: 19061 - RNA, 19 nt, Artificial Sequence
  Synthetic
aguaaagauccuaaagguu

SEQ ID NO: 19062 - RNA, 19 nt, Artificial Sequence
  Synthetic
ccuucuaagacaagcaaca

SEQ ID NO: 19063 - RNA, 19 nt, Artificial Sequence
  Synthetic
gcggaaaggcggaagauaa

SEQ ID NO: 19064 - RNA, 19 nt, Artificial Sequence
  Synthetic
cuauaaagcaauuggcaaa

SEQ ID NO: 19065 - RNA, 19 nt, Artificial Sequence
  Synthetic
agaauaagcugucguuaaa

SEQ ID NO: 19066 - RNA, 19 nt, Artificial Sequence
  Synthetic
aagaauaagcugucguuaa

SEQ ID NO: 19067 - RNA, 19 nt, Artificial Sequence
  Synthetic
gggcuaauauacuuguaaa

SEQ ID NO: 19068 - RNA, 19 nt, Artificial Sequence
  Synthetic
aaacaaacgagcaggcauu

SEQ ID NO: 19069 - RNA, 19 nt, Artificial Sequence
  Synthetic
augcaaagccugagagaug

SEQ ID NO: 19070 - RNA, 19 nt, Artificial Sequence
  Synthetic
gaacuuauggacaugaaua

SEQ ID NO: 19071 - RNA, 19 nt, Artificial Sequence
  Synthetic
uaaaugaacuggaccaaau

SEQ ID NO: 19072 - RNA, 19 nt, Artificial Sequence
  Synthetic
aggaauaccucuacuaaca

SEQ ID NO: 19073 - RNA, 19 nt, Artificial Sequence
  Synthetic
gaaacagucccuaaagcaa

SEQ ID NO: 19074 - RNA, 19 nt, Artificial Sequence
  Synthetic
gcuuggaucuggaacaaau

SEQ ID NO: 19075 - RNA, 19 nt, Artificial Sequence
  Synthetic
ccucuuuccuggaguaaau

SEQ ID NO: 19076 - RNA, 19 nt, Artificial Sequence
  Synthetic
cccuaaagcaagaggagga

SEQ ID NO: 19077 - RNA, 19 nt, Artificial Sequence
  Synthetic
cuacuaugcauguaaacaa

SEQ ID NO: 19078 - RNA, 19 nt, Artificial Sequence
  Synthetic
gaaguuaugaagaugcaaa

SEQ ID NO: 19079 - RNA, 19 nt, Artificial Sequence
  Synthetic
gaguaaaugaacuggacca

SEQ ID NO: 19080 - RNA, 19 nt, Artificial Sequence
  Synthetic
uucaaacagucgagagcua

SEQ ID NO: 19081 - RNA, 19 nt, Artificial Sequence
  Synthetic
gaacagaggaaaacagaga

SEQ ID NO: 19082 - RNA, 19 nt, Artificial Sequence
  Synthetic
gggagaagauacccauuau

SEQ ID NO: 19083 - RNA, 19 nt, Artificial Sequence
  Synthetic
agacagauccgcagaagga

SEQ ID NO: 19084 - RNA, 19 nt, Artificial Sequence
  Synthetic
ugagcuaauacgagggaga

SEQ ID NO: 19085 - RNA, 19 nt, Artificial Sequence
  Synthetic
acuauaaagcaauuggcaa

SEQ ID NO: 19086 - RNA, 19 nt, Artificial Sequence
  Synthetic
aagcagaaacagucccuaa

SEQ ID NO: 19087 - RNA, 19 nt, Artificial Sequence
  Synthetic
agucgagagcuaugaauuu

SEQ ID NO: 19088 - RNA, 19 nt, Artificial Sequence
  Synthetic
gcaaaauaggagagggaac

SEQ ID NO: 19089 - RNA, 19 nt, Artificial Sequence
  Synthetic
ggaucauauucacagaaau

SEQ ID NO: 19090 - RNA, 19 nt, Artificial Sequence
  Synthetic
ccaagaugaagaacuauaa

SEQ ID NO: 19091 - RNA, 19 nt, Artificial Sequence
  Synthetic
gaaacuacuaugcauguaa

SEQ ID NO: 19092 - RNA, 19 nt, Artificial Sequence
  Synthetic
gaucauauucacagaaaug

SEQ ID NO: 19093 - RNA, 19 nt, Artificial Sequence
  Synthetic
cgagagaacaugugauaaa

SEQ ID NO: 19094 - RNA, 19 nt, Artificial Sequence
  Synthetic
gcugaaaguaugaggaaga

SEQ ID NO: 19095 - RNA, 19 nt, Artificial Sequence
  Synthetic
aaucaaagcuagaggaacu

SEQ ID NO: 19096 - RNA, 19 nt, Artificial Sequence
  Synthetic
acacaucaucagagagaua

SEQ ID NO: 19097 - RNA, 19 nt, Artificial Sequence
  Synthetic
cgaaagaacuccuuacauu

SEQ ID NO: 19098 - RNA, 19 nt, Artificial Sequence
  Synthetic
gggaaguauuaaugcagaa

SEQ ID NO: 19099 - RNA, 19 nt, Artificial Sequence
  Synthetic
uagaagaaguuuugcgaga

SEQ ID NO: 19100 - RNA, 19 nt, Artificial Sequence
  Synthetic
cucuaaagguucugggcaa

SEQ ID NO: 19101 - RNA, 19 nt, Artificial Sequence
  Synthetic
ggaccgagcaggaguggaa

SEQ ID NO: 19102 - RNA, 19 nt, Artificial Sequence
  Synthetic
ggaggaugcuggagacauu

SEQ ID NO: 19103 - RNA, 19 nt, Artificial Sequence
  Synthetic
gaauagaucaucagccaaa

SEQ ID NO: 19104 - RNA, 19 nt, Artificial Sequence
  Synthetic
ggacaauauacgauguaau

SEQ ID NO: 19105 - RNA, 19 nt, Artificial Sequence
  Synthetic
agaccaucgugcaggauua

SEQ ID NO: 19106 - RNA, 19 nt, Artificial Sequence
  Synthetic
aggaggagcaggaugguaa

SEQ ID NO: 19107 - RNA, 19 nt, Artificial Sequence
  Synthetic
aucaagaauuugugcguaa

SEQ ID NO: 19108 - RNA, 19 nt, Artificial Sequence
  Synthetic
gaagagaauuccaaaguca

SEQ ID NO: 19109 - RNA, 19 nt, Artificial Sequence
  Synthetic
gaggaacuauccagaguaa

SEQ ID NO: 19110 - RNA, 19 nt, Artificial Sequence
  Synthetic
uagaagagaaugucgauaa

SEQ ID NO: 19111 - RNA, 19 nt, Artificial Sequence
  Synthetic
cgaggaugguugugcagaa

SEQ ID NO: 19112 - RNA, 19 nt, Artificial Sequence
  Synthetic
cuauaguguuugaagagaa

SEQ ID NO: 19113 - RNA, 19 nt, Artificial Sequence
  Synthetic
ugacaaagaccuuaucaua

SEQ ID NO: 19114 - RNA, 19 nt, Artificial Sequence
  Synthetic
gaaaguaugaggaagagaa

SEQ ID NO: 19115 - RNA, 19 nt, Artificial Sequence
  Synthetic
caucaaggacuaaaggcaa

SEQ ID NO: 19116 - RNA, 19 nt, Artificial Sequence
  Synthetic
cgggaacgguagaagagaa

SEQ ID NO: 19117 - RNA, 19 nt, Artificial Sequence
  Synthetic
gggaacgguagaagagaau

SEQ ID NO: 19118 - RNA, 19 nt, Artificial Sequence
  Synthetic
gaaagaacuccuuacauua

SEQ ID NO: 19119 - RNA, 19 nt, Artificial Sequence
  Synthetic
gaacaacagaggugaacau

SEQ ID NO: 19120 - RNA, 19 nt, Artificial Sequence
  Synthetic
ccuaaauuugcuagaagaa

SEQ ID NO: 19121 - RNA, 19 nt, Artificial Sequence
  Synthetic
cagaauagaucaucagcca

SEQ ID NO: 19122 - RNA, 19 nt, Artificial Sequence
  Synthetic
acagaaaucgaaaggcuua

SEQ ID NO: 19123 - RNA, 19 nt, Artificial Sequence
  Synthetic
ugucauuagcagagccaaa

SEQ ID NO: 19124 - RNA, 19 nt, Artificial Sequence
  Synthetic
gcaaugaaagugaggcuga

SEQ ID NO: 19125 - RNA, 19 nt, Artificial Sequence
  Synthetic
cagagaaagucaaggcugu

SEQ ID NO: 19126 - RNA, 19 nt, Artificial Sequence
  Synthetic
gcaaugacguccauggugu

SEQ ID NO: 19127 - RNA, 19 nt, Artificial Sequence
  Synthetic
uauuggcuuuggagggaaa

SEQ ID NO: 19128 - RNA, 19 nt, Artificial Sequence
  Synthetic
ccuuggaagacaugcucaa

SEQ ID NO: 19129 - RNA, 19 nt, Artificial Sequence
  Synthetic
gguguguaagguuggcaaa

SEQ ID NO: 19130 - RNA, 19 nt, Artificial Sequence
  Synthetic
aagucaaggcuguggauac

SEQ ID NO: 19131 - RNA, 19 nt, Artificial Sequence
  Synthetic
ccgcaggaguggagugaaa

SEQ ID NO: 19132 - RNA, 19 nt, Artificial Sequence
  Synthetic
gcacauucccacagagaaa

SEQ ID NO: 19133 - RNA, 19 nt, Artificial Sequence
  Synthetic
agacagaaccugagccaaa

SEQ ID NO: 19134 - RNA, 19 nt, Artificial Sequence
  Synthetic
cgaaauaacuccagcaacu

SEQ ID NO: 19135 - RNA, 19 nt, Artificial Sequence
  Synthetic
cauaguggcuggagcaaau

SEQ ID NO: 19136 - RNA, 19 nt, Artificial Sequence
  Synthetic
ccagaauaucauugucaua

SEQ ID NO: 19137 - RNA, 19 nt, Artificial Sequence
  Synthetic
ugaaagugaggcugagauu

SEQ ID NO: 19138 - RNA, 19 nt, Artificial Sequence
  Synthetic
caauaaugaaggccagaau

SEQ ID NO: 19139 - RNA, 19 nt, Artificial Sequence
  Synthetic
auaaugaaggccagaauau

SEQ ID NO: 19140 - RNA, 19 nt, Artificial Sequence
  Synthetic
gacuaaagaugcugcuaca

SEQ ID NO: 19141 - RNA, 19 nt, Artificial Sequence
  Synthetic
uguccaggcugcaggaaca

SEQ ID NO: 19142 - RNA, 19 nt, Artificial Sequence
  Synthetic
aaagugaggcugagauuuu

SEQ ID NO: 19143 - RNA, 19 nt, Artificial Sequence
  Synthetic
cacaaaacaaccagaauua

SEQ ID NO: 19144 - RNA, 19 nt, Artificial Sequence
  Synthetic
gcacaaaacaaccagaauu

SEQ ID NO: 19145 - RNA, 19 nt, Artificial Sequence
  Synthetic
guguaagguuggcaaagau

SEQ ID NO: 19146 - RNA, 19 nt, Artificial Sequence
  Synthetic
ugacguccaugguguguaa

SEQ ID NO: 19147 - RNA, 19 nt, Artificial Sequence
  Synthetic
gcuccuggcuaaugcuuau

SEQ ID NO: 19148 - RNA, 19 nt, Artificial Sequence
  Synthetic
aauaaugaaggccagaaua

SEQ ID NO: 19149 - RNA, 19 nt, Artificial Sequence
  Synthetic
gguggcugcuccuggcuaa

SEQ ID NO: 19150 - RNA, 19 nt, Artificial Sequence
  Synthetic
ccucaagcuucaauuuauu

SEQ ID NO: 19151 - RNA, 19 nt, Artificial Sequence
  Synthetic
caaaucuguccuuggaaga

SEQ ID NO: 19152 - RNA, 19 nt, Artificial Sequence
  Synthetic
cauccauggacauaaguuu

SEQ ID NO: 19153 - RNA, 19 nt, Artificial Sequence
  Synthetic
gguaagaacuccaggucua

SEQ ID NO: 19154 - RNA, 19 nt, Artificial Sequence
  Synthetic
gcaaagaccuggagaagau

SEQ ID NO: 19155 - RNA, 19 nt, Artificial Sequence
  Synthetic
gaagaaacaugcugagaau

SEQ ID NO: 19156 - RNA, 19 nt, Artificial Sequence
  Synthetic
uggagaagaugaugguuaa

SEQ ID NO: 19157 - RNA, 19 nt, Artificial Sequence
  Synthetic
cgggaaagucuguguggaa

SEQ ID NO: 19158 - RNA, 19 nt, Artificial Sequence
  Synthetic
ccaagaacagguugaauaa

SEQ ID NO: 19159 - RNA, 19 nt, Artificial Sequence
  Synthetic
gcaucaacguccaguacaa

SEQ ID NO: 19160 - RNA, 19 nt, Artificial Sequence
  Synthetic
ccgugaagaugcugaaaga

SEQ ID NO: 19161 - RNA, 19 nt, Artificial Sequence
  Synthetic
gcagaaaagagucggauua

SEQ ID NO: 19162 - RNA, 19 nt, Artificial Sequence
  Synthetic
gugaagaugcugaaagaga

SEQ ID NO: 19163 - RNA, 19 nt, Artificial Sequence
  Synthetic
ccaguuaaauggauggcaa

SEQ ID NO: 19164 - RNA, 19 nt, Artificial Sequence
  Synthetic
cuggagaagaugaugguua

SEQ ID NO: 19165 - RNA, 19 nt, Artificial Sequence
  Synthetic
aaauaugguucuugccaaa

SEQ ID NO: 19166 - RNA, 19 nt, Artificial Sequence
  Synthetic
agaugaagauuucggauuu

SEQ ID NO: 19167 - RNA, 19 nt, Artificial Sequence
  Synthetic
gggcggaagaugaagauuu

SEQ ID NO: 19168 - RNA, 19 nt, Artificial Sequence
  Synthetic
ccacauggauugaaaacaa

SEQ ID NO: 19169 - RNA, 19 nt, Artificial Sequence
  Synthetic
gguagugucuguuaaguua

SEQ ID NO: 19170 - RNA, 19 nt, Artificial Sequence
  Synthetic
ggaagaaacaugcugagaa

SEQ ID NO: 19171 - RNA, 19 nt, Artificial Sequence
  Synthetic
caagagagcacaugauauu

SEQ ID NO: 19172 - RNA, 19 nt, Artificial Sequence
  Synthetic
gugaaaggcccauggauca

SEQ ID NO: 19173 - RNA, 19 nt, Artificial Sequence
  Synthetic
gagaaggcgaauuuggaaa

SEQ ID NO: 19174 - RNA, 19 nt, Artificial Sequence
  Synthetic
gaggcaaggagauggcaaa

SEQ ID NO: 19175 - RNA, 19 nt, Artificial Sequence
  Synthetic
aguaguaaucugucaguua

SEQ ID NO: 19176 - RNA, 19 nt, Artificial Sequence
  Synthetic
gggaaagucuguguggaaa

SEQ ID NO: 19177 - RNA, 19 nt, Artificial Sequence
  Synthetic
gcaaagggaucaccaggaa

SEQ ID NO: 19178 - RNA, 19 nt, Artificial Sequence
  Synthetic
ugaagaugcugaaagagaa

SEQ ID NO: 19179 - RNA, 19 nt, Artificial Sequence
  Synthetic
ggaaagucuguguggaaaa

SEQ ID NO: 19180 - RNA, 19 nt, Artificial Sequence
  Synthetic
gggugggaaucaagucaua

SEQ ID NO: 19181 - RNA, 19 nt, Artificial Sequence
  Synthetic
caguuuacauuuaggcauu

SEQ ID NO: 19182 - RNA, 19 nt, Artificial Sequence
  Synthetic
gaccugaacuguuggauuu

SEQ ID NO: 19183 - RNA, 19 nt, Artificial Sequence
  Synthetic
ggauaaagaguauggauaa

SEQ ID NO: 19184 - RNA, 19 nt, Artificial Sequence
  Synthetic
ggacaauauuccagggauu

SEQ ID NO: 19185 - RNA, 19 nt, Artificial Sequence
  Synthetic
acacaucgcuggagggaua

SEQ ID NO: 19186 - RNA, 19 nt, Artificial Sequence
  Synthetic
gggauaaagaguauggaua

SEQ ID NO: 19187 - RNA, 19 nt, Artificial Sequence
  Synthetic
ggagaaaauccaagaauua

SEQ ID NO: 19188 - RNA, 19 nt, Artificial Sequence
  Synthetic
cuaaagcaguucacagaaa

SEQ ID NO: 19189 - RNA, 19 nt, Artificial Sequence
  Synthetic
gggaauugaccaugcuuaa

SEQ ID NO: 19190 - RNA, 19 nt, Artificial Sequence
  Synthetic
agguagaggugggagauaa

SEQ ID NO: 19191 - RNA, 19 nt, Artificial Sequence
  Synthetic
ggaacaggcacgagcugaa

SEQ ID NO: 19192 - RNA, 19 nt, Artificial Sequence
  Synthetic
agucagauauggagaaaau

SEQ ID NO: 19193 - RNA, 19 nt, Artificial Sequence
  Synthetic
uaagagaggcucaguuaua

SEQ ID NO: 19194 - RNA, 19 nt, Artificial Sequence
  Synthetic
ucaagacauccuagaaaua

SEQ ID NO: 19195 - RNA, 19 nt, Artificial Sequence
  Synthetic
gggcagugucuuuguggua

SEQ ID NO: 19196 - RNA, 19 nt, Artificial Sequence
  Synthetic
cuggagggauaaagaguau

SEQ ID NO: 19197 - RNA, 19 nt, Artificial Sequence
  Synthetic
gcugaacucuugagccuaa

SEQ ID NO: 19198 - RNA, 19 nt, Artificial Sequence
  Synthetic
ccaaugugccauaguuuua

SEQ ID NO: 19199 - RNA, 19 nt, Artificial Sequence
  Synthetic
ccaccucuguuaugagaua

SEQ ID NO: 19200 - RNA, 19 nt, Artificial Sequence
  Synthetic
gaagauuguuugggaguuu

SEQ ID NO: 19201 - RNA, 19 nt, Artificial Sequence
  Synthetic
guaaugagauguaucaaga

SEQ ID NO: 19202 - RNA, 19 nt, Artificial Sequence
  Synthetic
cuuaaaggagcaugaguau

SEQ ID NO: 19203 - RNA, 19 nt, Artificial Sequence
  Synthetic
cuaacaaccuagacuggaa

SEQ ID NO: 19204 - RNA, 19 nt, Artificial Sequence
  Synthetic
ggcaagugcgguacaguua

SEQ ID NO: 19205 - RNA, 19 nt, Artificial Sequence
  Synthetic
gcagucagauauggagaaa

SEQ ID NO: 19206 - RNA, 19 nt, Artificial Sequence
  Synthetic
gagcugaacucuugagccu

SEQ ID NO: 19207 - RNA, 19 nt, Artificial Sequence
  Synthetic
gggagaagauuguuuggga

SEQ ID NO: 19208 - RNA, 19 nt, Artificial Sequence
  Synthetic
auuaagagaggcucaguua

SEQ ID NO: 19209 - RNA, 19 nt, Artificial Sequence
  Synthetic
gagaagauuguuugggagu

SEQ ID NO: 19210 - RNA, 19 nt, Artificial Sequence
  Synthetic
uaucaagacauccuagaaa

SEQ ID NO: 19211 - RNA, 19 nt, Artificial Sequence
  Synthetic
gccauuggaucaugagaca

SEQ ID NO: 19212 - RNA, 19 nt, Artificial Sequence
  Synthetic
agauggagagggagaagau

SEQ ID NO: 19213 - RNA, 19 nt, Artificial Sequence
  Synthetic
ggaaagacaucgaggacua

SEQ ID NO: 19214 - RNA, 19 nt, Artificial Sequence
  Synthetic
gagagaagguggagaacaa

SEQ ID NO: 19215 - RNA, 19 nt, Artificial Sequence
  Synthetic
gcaagaagcugaacaagaa

SEQ ID NO: 19216 - RNA, 19 nt, Artificial Sequence
  Synthetic
gugcuaugguggagaagaa

SEQ ID NO: 19217 - RNA, 19 nt, Artificial Sequence
  Synthetic
ucucagagcccgugaagua

SEQ ID NO: 19218 - RNA, 19 nt, Artificial Sequence
  Synthetic
ggauaguggcgaaguuuaa

SEQ ID NO: 19219 - RNA, 19 nt, Artificial Sequence
  Synthetic
guggagagaagguggagaa

SEQ ID NO: 19220 - RNA, 19 nt, Artificial Sequence
  Synthetic
acaagaagcggcugaagaa

SEQ ID NO: 19221 - RNA, 19 nt, Artificial Sequence
  Synthetic
agaacgugcugcuggacaa

SEQ ID NO: 19222 - RNA, 19 nt, Artificial Sequence
  Synthetic
gggauaguggcgaaguuua

SEQ ID NO: 19223 - RNA, 19 nt, Artificial Sequence
  Synthetic
ccaaaacugucuacgcaaa

SEQ ID NO: 19224 - RNA, 19 nt, Artificial Sequence
  Synthetic
gagcugaagcaccggauca

SEQ ID NO: 19225 - RNA, 19 nt, Artificial Sequence
  Synthetic
gccuggaguuugagagugu

SEQ ID NO: 19226 - RNA, 19 nt, Artificial Sequence
  Synthetic
ugcaagaagcugaacaaga

SEQ ID NO: 19227 - RNA, 19 nt, Artificial Sequence
  Synthetic
aagaagcggcugaagaaga

SEQ ID NO: 19228 - RNA, 19 nt, Artificial Sequence
  Synthetic
ucucaaaggccauggaaau

SEQ ID NO: 19229 - RNA, 19 nt, Artificial Sequence
  Synthetic
ucaaggaagcccagagaga

SEQ ID NO: 19230 - RNA, 19 nt, Artificial Sequence
  Synthetic
ggauaaauauguaagugga

SEQ ID NO: 19231 - RNA, 19 nt, Artificial Sequence
  Synthetic
aaaggaaacccuaggaaaa

SEQ ID NO: 19232 - RNA, 19 nt, Artificial Sequence
  Synthetic
auucaguacaugagaagaa

SEQ ID NO: 19233 - RNA, 19 nt, Artificial Sequence
  Synthetic
aauugaaggaagaggacau

SEQ ID NO: 19234 - RNA, 19 nt, Artificial Sequence
  Synthetic
uggaugaagagguguuuaa

SEQ ID NO: 19235 - RNA, 19 nt, Artificial Sequence
  Synthetic
aaggaagcccagagagaga

SEQ ID NO: 19236 - RNA, 19 nt, Artificial Sequence
  Synthetic
aggaagaggacauggccau

SEQ ID NO: 19237 - RNA, 19 nt, Artificial Sequence
  Synthetic
gcauauauuccuagaaccu

SEQ ID NO: 19238 - RNA, 19 nt, Artificial Sequence
  Synthetic
ggacccugacauugauaaa

SEQ ID NO: 19239 - RNA, 19 nt, Artificial Sequence
  Synthetic
ggaaagugaauguggccaa

SEQ ID NO: 19240 - RNA, 19 nt, Artificial Sequence
  Synthetic
aggcauuguaugagaggaa

SEQ ID NO: 19241 - RNA, 19 nt, Artificial Sequence
  Synthetic
cugaacaaauaaaggaaga

SEQ ID NO: 19242 - RNA, 19 nt, Artificial Sequence
  Synthetic
gggaaaacaugcaaaauau

SEQ ID NO: 19243 - RNA, 19 nt, Artificial Sequence
  Synthetic
caaaggaaaugcaggcaga

SEQ ID NO: 19244 - RNA, 19 nt, Artificial Sequence
  Synthetic
cauuaaagcuucacagacu

SEQ ID NO: 19245 - RNA, 19 nt, Artificial Sequence
  Synthetic
gcugauucauggagauuuu

SEQ ID NO: 19246 - RNA, 19 nt, Artificial Sequence
  Synthetic
ggaagaaccucguuucgaa

SEQ ID NO: 19247 - RNA, 19 nt, Artificial Sequence
  Synthetic
cgagaugacuucagggucu

SEQ ID NO: 19248 - RNA, 19 nt, Artificial Sequence
  Synthetic
aaaugaagaaggacaacaa

SEQ ID NO: 19249 - RNA, 19 nt, Artificial Sequence
  Synthetic
aggacaacaauuugcauua

SEQ ID NO: 19250 - RNA, 19 nt, Artificial Sequence
  Synthetic
ccuuaaacaugguggcugu

SEQ ID NO: 19251 - RNA, 19 nt, Artificial Sequence
  Synthetic
gcauuguaugagaggaaau

SEQ ID NO: 19252 - RNA, 19 nt, Artificial Sequence
  Synthetic
uaucauaaacauaggcaca

SEQ ID NO: 19253 - RNA, 19 nt, Artificial Sequence
  Synthetic
cauuagguccagaugauaa

SEQ ID NO: 19254 - RNA, 19 nt, Artificial Sequence
  Synthetic
uggugaaacagaaggugaa

SEQ ID NO: 19255 - RNA, 19 nt, Artificial Sequence
  Synthetic
caguauaugaugaagcuau

SEQ ID NO: 19256 - RNA, 19 nt, Artificial Sequence
  Synthetic
ccaaaacuguccagggcua

SEQ ID NO: 19257 - RNA, 19 nt, Artificial Sequence
  Synthetic
ucagaagaauggaaggaaa

SEQ ID NO: 19258 - RNA, 19 nt, Artificial Sequence
  Synthetic
agauagaagcuuuggagaa

SEQ ID NO: 19259 - RNA, 19 nt, Artificial Sequence
  Synthetic
ccaaagaauugcaguuaga

SEQ ID NO: 19260 - RNA, 19 nt, Artificial Sequence
  Synthetic
aaguaaagcucaauaguga

SEQ ID NO: 19261 - RNA, 19 nt, Artificial Sequence
  Synthetic
gggagaaagaacacagcaa

SEQ ID NO: 19262 - RNA, 19 nt, Artificial Sequence
  Synthetic
caccaaacaugaugaagua

SEQ ID NO: 19263 - RNA, 19 nt, Artificial Sequence
  Synthetic
ugaaguaguaugugggaga

SEQ ID NO: 19264 - RNA, 19 nt, Artificial Sequence
  Synthetic
cuggaauguuggagacaau

SEQ ID NO: 19265 - RNA, 19 nt, Artificial Sequence
  Synthetic
gagaaagaacacagcaaga

SEQ ID NO: 19266 - RNA, 19 nt, Artificial Sequence
  Synthetic
ccuuaugaagacagcgaua

SEQ ID NO: 19267 - RNA, 19 nt, Artificial Sequence
  Synthetic
gcucugaagaugagguuga

SEQ ID NO: 19268 - RNA, 19 nt, Artificial Sequence
  Synthetic
gagguugacuggcaggaua

SEQ ID NO: 19269 - RNA, 19 nt, Artificial Sequence
  Synthetic
gaaagaugauggagaccca

SEQ ID NO: 19270 - RNA, 19 nt, Artificial Sequence
  Synthetic
aguuauaccuacagaaugu

SEQ ID NO: 19271 - RNA, 19 nt, Artificial Sequence
  Synthetic
cagcaagaauggaaaauuu

SEQ ID NO: 19272 - RNA, 19 nt, Artificial Sequence
  Synthetic
gcaggauacucgugaugau

SEQ ID NO: 19273 - RNA, 19 nt, Artificial Sequence
  Synthetic
gaaagaagccuacuaucaa

SEQ ID NO: 19274 - RNA, 19 nt, Artificial Sequence
  Synthetic
cgugaagaguuuaaagaaa

SEQ ID NO: 19275 - RNA, 19 nt, Artificial Sequence
  Synthetic
gcaaagaccuuacgagaau

SEQ ID NO: 19276 - RNA, 19 nt, Artificial Sequence
  Synthetic
cgagauggacugaaagaaa

SEQ ID NO: 19277 - RNA, 19 nt, Artificial Sequence
  Synthetic
gaguacugcccaagagaaa

SEQ ID NO: 19278 - RNA, 19 nt, Artificial Sequence
  Synthetic
ggaaagaaaucugcagcaa

SEQ ID NO: 19279 - RNA, 19 nt, Artificial Sequence
  Synthetic
uggaaaucauugaaggaau

SEQ ID NO: 19280 - RNA, 19 nt, Artificial Sequence
  Synthetic
gaaagaaaucugcagcaaa

SEQ ID NO: 19281 - RNA, 19 nt, Artificial Sequence
  Synthetic
ccacuagucugacggauaa

SEQ ID NO: 19282 - RNA, 19 nt, Artificial Sequence
  Synthetic
ugaauaaugaagagcacaa

SEQ ID NO: 19283 - RNA, 19 nt, Artificial Sequence
  Synthetic
ggaaggauaauuuuggaaa

SEQ ID NO: 19284 - RNA, 19 nt, Artificial Sequence
  Synthetic
ggugaugagggaaggcaua

SEQ ID NO: 19285 - RNA, 19 nt, Artificial Sequence
  Synthetic
ggagcaaacugaauaauga

SEQ ID NO: 19286 - RNA, 19 nt, Artificial Sequence
  Synthetic
cagcaaagaccuuacgaga

SEQ ID NO: 19287 - RNA, 19 nt, Artificial Sequence
  Synthetic
aagaggacgugaagaguuu

SEQ ID NO: 19288 - RNA, 19 nt, Artificial Sequence
  Synthetic
ccaacugcauugagcacaa

SEQ ID NO: 19289 - RNA, 19 nt, Artificial Sequence
  Synthetic
ccagacagaauguggcuua

SEQ ID NO: 19290 - RNA, 19 nt, Artificial Sequence
  Synthetic
auacaauaguacuggcauu

SEQ ID NO: 19291 - RNA, 19 nt, Artificial Sequence
  Synthetic
guaucagaacaauggauua

SEQ ID NO: 19292 - RNA, 19 nt, Artificial Sequence
  Synthetic
ugaaugacgucaacgcaaa

SEQ ID NO: 19293 - RNA, 19 nt, Artificial Sequence
  Synthetic
uugcaaauaaggagccaua

SEQ ID NO: 19294 - RNA, 19 nt, Artificial Sequence
  Synthetic
ccuuuaagauguggagcaa

SEQ ID NO: 19295 - RNA, 19 nt, Artificial Sequence
  Synthetic
augcaguugugaagagaau

SEQ ID NO: 19296 - RNA, 19 nt, Artificial Sequence
  Synthetic
guguagaagaggacgugaa

SEQ ID NO: 19297 - RNA, 19 nt, Artificial Sequence
  Synthetic
acgcaaagcccacagagaa

SEQ ID NO: 19298 - RNA, 19 nt, Artificial Sequence
  Synthetic
cuacuagacagcacaaaua

SEQ ID NO: 19299 - RNA, 19 nt, Artificial Sequence
  Synthetic
gagauggacugaaagaaaa

SEQ ID NO: 19300 - RNA, 19 nt, Artificial Sequence
  Synthetic
ucacauggcuuuggaacaa

SEQ ID NO: 19301 - RNA, 19 nt, Artificial Sequence
  Synthetic
ugagcgagauggacugaaa

SEQ ID NO: 19302 - RNA, 19 nt, Artificial Sequence
  Synthetic
aguacauggagaagggcaa

SEQ ID NO: 19303 - RNA, 19 nt, Artificial Sequence
  Synthetic
ccuucaagccggucaaauu

SEQ ID NO: 19304 - RNA, 19 nt, Artificial Sequence
  Synthetic
ggaaaucacaguugggaua

SEQ ID NO: 19305 - RNA, 19 nt, Artificial Sequence
  Synthetic
gagaacauuugaagagaua

SEQ ID NO: 19306 - RNA, 19 nt, Artificial Sequence
  Synthetic
gggaagacauugugaacca

SEQ ID NO: 19307 - RNA, 19 nt, Artificial Sequence
  Synthetic
gggaaguguuauccagaaa

SEQ ID NO: 19308 - RNA, 19 nt, Artificial Sequence
  Synthetic
gggaauaguuacugaauac

SEQ ID NO: 19309 - RNA, 19 nt, Artificial Sequence
  Synthetic
aaacaaaguuacagagugu

SEQ ID NO: 19310 - RNA, 19 nt, Artificial Sequence
  Synthetic
gcucaagacuguuauuuua

SEQ ID NO: 19311 - RNA, 19 nt, Artificial Sequence
  Synthetic
gaacauaccuguaaaucau

SEQ ID NO: 19312 - RNA, 19 nt, Artificial Sequence
  Synthetic
cuuaagagaagcugaaauu

SEQ ID NO: 19313 - RNA, 19 nt, Artificial Sequence
  Synthetic
gaaaggaugucuuaagaga

SEQ ID NO: 19314 - RNA, 19 nt, Artificial Sequence
  Synthetic
gggacuugaucaugaaaga

SEQ ID NO: 19315 - RNA, 19 nt, Artificial Sequence
  Synthetic
ugccaaaguuauaguacaa

SEQ ID NO: 19316 - RNA, 19 nt, Artificial Sequence
  Synthetic
cauccaaggagaagaauuu

SEQ ID NO: 19317 - RNA, 19 nt, Artificial Sequence
  Synthetic
ugaaauugcccuuggugua

SEQ ID NO: 19318 - RNA, 19 nt, Artificial Sequence
  Synthetic
ccagaaggagggacaauua

SEQ ID NO: 19319 - RNA, 19 nt, Artificial Sequence
  Synthetic
gauaauguauaguguguca

SEQ ID NO: 19320 - RNA, 19 nt, Artificial Sequence
  Synthetic
gauugcagauuuugguuua

SEQ ID NO: 19321 - RNA, 19 nt, Artificial Sequence
  Synthetic
gaaccaguuuugagaacau

SEQ ID NO: 19322 - RNA, 19 nt, Artificial Sequence
  Synthetic
caauaugacuccuccuuua

SEQ ID NO: 19323 - RNA, 19 nt, Artificial Sequence
  Synthetic
gagcaaaagggaagacauu

SEQ ID NO: 19324 - RNA, 19 nt, Artificial Sequence
  Synthetic
acacaaagcuagauuuagu

SEQ ID NO: 19325 - RNA, 19 nt, Artificial Sequence
  Synthetic
ggaauuaucucugaacaua

SEQ ID NO: 19326 - RNA, 19 nt, Artificial Sequence
  Synthetic
acuugaagacucagaauau

SEQ ID NO: 19327 - RNA, 19 nt, Artificial Sequence
  Synthetic
gaaagaggacuaugaacuu

SEQ ID NO: 19328 - RNA, 19 nt, Artificial Sequence
  Synthetic
ugggaauaguuacugaaua

SEQ ID NO: 19329 - RNA, 19 nt, Artificial Sequence
  Synthetic
cgacagugaaagaaaggau

SEQ ID NO: 19330 - RNA, 19 nt, Artificial Sequence
  Synthetic
augaagaaaguuugccaua

SEQ ID NO: 19331 - RNA, 19 nt, Artificial Sequence
  Synthetic
ugaucaugaaagaggacua

SEQ ID NO: 19332 - RNA, 19 nt, Artificial Sequence
  Synthetic
cagauaauguauagugugu

SEQ ID NO: 19333 - RNA, 19 nt, Artificial Sequence
  Synthetic
ugaaagaggacuaugaacu

SEQ ID NO: 19334 - RNA, 19 nt, Artificial Sequence
  Synthetic
guauaaucauagcgggaaa

SEQ ID NO: 19335 - RNA, 19 nt, Artificial Sequence
  Synthetic
ggacagaaauggauggcuu

SEQ ID NO: 19336 - RNA, 19 nt, Artificial Sequence
  Synthetic
ugacuaaauucauggagaa

SEQ ID NO: 19337 - RNA, 19 nt, Artificial Sequence
  Synthetic
ggccaaggagggacagaaa

SEQ ID NO: 19338 - RNA, 19 nt, Artificial Sequence
  Synthetic
auggauggcuuuaggagaa

SEQ ID NO: 19339 - RNA, 19 nt, Artificial Sequence
  Synthetic
ucgaggaacuggagaacca

SEQ ID NO: 19340 - RNA, 19 nt, Artificial Sequence
  Synthetic
gcaagaaggcccuaaagau

SEQ ID NO: 19341 - RNA, 19 nt, Artificial Sequence
  Synthetic
gcuacgauguggcggucaa

SEQ ID NO: 19342 - RNA, 19 nt, Artificial Sequence
  Synthetic
ccaucgaggaacuggagaa

SEQ ID NO: 19343 - RNA, 19 nt, Artificial Sequence
  Synthetic
gugacuaaauucauggaga

SEQ ID NO: 19344 - RNA, 19 nt, Artificial Sequence
  Synthetic
ccagggaggucaaggccau

SEQ ID NO: 19345 - RNA, 19 nt, Artificial Sequence
  Synthetic
uguacgaagcagugugcaa

SEQ ID NO: 19346 - RNA, 19 nt, Artificial Sequence
  Synthetic
acgucaagcuggcagauuu

SEQ ID NO: 19347 - RNA, 19 nt, Artificial Sequence
  Synthetic
gcuuagaaggacugaagga

SEQ ID NO: 19348 - RNA, 19 nt, Artificial Sequence
  Synthetic
gacaacaacuacuugacua

SEQ ID NO: 19349 - RNA, 19 nt, Artificial Sequence
  Synthetic
cgauauccagggaggucaa

SEQ ID NO: 19350 - RNA, 19 nt, Artificial Sequence
  Synthetic
ugguauaaucauagcggga

SEQ ID NO: 19351 - RNA, 19 nt, Artificial Sequence
  Synthetic
ggguuaucgagaaggugaa

SEQ ID NO: 19352 - RNA, 19 nt, Artificial Sequence
  Synthetic
acccagagcugcacgucaa

SEQ ID NO: 19353 - RNA, 19 nt, Artificial Sequence
  Synthetic
uggaagagaaguugaguug

SEQ ID NO: 19354 - RNA, 19 nt, Artificial Sequence
  Synthetic
uggcaagucuggauaacga

SEQ ID NO: 19355 - RNA, 19 nt, Artificial Sequence
  Synthetic
uuuaggagaaccauagaaa

SEQ ID NO: 19356 - RNA, 19 nt, Artificial Sequence
  Synthetic
acaacaacuacuugacuau

SEQ ID NO: 19357 - RNA, 19 nt, Artificial Sequence
  Synthetic
accaggagcucgucggcaa

SEQ ID NO: 19358 - RNA, 19 nt, Artificial Sequence
  Synthetic
caagaaggcccuaaagauc

SEQ ID NO: 19359 - RNA, 19 nt, Artificial Sequence
  Synthetic
caggguugguauaaucaua

SEQ ID NO: 19360 - RNA, 19 nt, Artificial Sequence
  Synthetic
ccccagaacuguuuguuaa

SEQ ID NO: 19361 - RNA, 19 nt, Artificial Sequence
  Synthetic
ccagugacgucuacagcuu

SEQ ID NO: 19362 - RNA, 19 nt, Artificial Sequence
  Synthetic
ggagccaaauccaguaaca

SEQ ID NO: 19363 - RNA, 19 nt, Artificial Sequence
  Synthetic
agugcuugcuggaagagaa

SEQ ID NO: 19364 - RNA, 19 nt, Artificial Sequence
  Synthetic
agaagaagcacuuggguuu

SEQ ID NO: 19365 - RNA, 19 nt, Artificial Sequence
  Synthetic
gcuggaagguggagccaau

SEQ ID NO: 19366 - RNA, 19 nt, Artificial Sequence
  Synthetic
agacaaaggaggaucaaga

SEQ ID NO: 19367 - RNA, 19 nt, Artificial Sequence
  Synthetic
gcaagagcacauagagauu

SEQ ID NO: 19368 - RNA, 19 nt, Artificial Sequence
  Synthetic
gaaaugaauccgacaucaa

SEQ ID NO: 19369 - RNA, 19 nt, Artificial Sequence
  Synthetic
gggaagauguggaaaauga

SEQ ID NO: 19370 - RNA, 19 nt, Artificial Sequence
  Synthetic
gcgugaagcugcugaaacu

SEQ ID NO: 19371 - RNA, 19 nt, Artificial Sequence
  Synthetic
gggagaacacauugaugaa

SEQ ID NO: 19372 - RNA, 19 nt, Artificial Sequence
  Synthetic
cacaggaagucaagagaga

SEQ ID NO: 19373 - RNA, 19 nt, Artificial Sequence
  Synthetic
gagaacacauugaugaaga

SEQ ID NO: 19374 - RNA, 19 nt, Artificial Sequence
  Synthetic
uagaagggcugcaguggaa

SEQ ID NO: 19375 - RNA, 19 nt, Artificial Sequence
  Synthetic
caaacaagccucaguguga

SEQ ID NO: 19376 - RNA, 19 nt, Artificial Sequence
  Synthetic
gugcaaacguggagccagu

SEQ ID NO: 19377 - RNA, 19 nt, Artificial Sequence
  Synthetic
uuauaagagaggagcaaau

SEQ ID NO: 19378 - RNA, 19 nt, Artificial Sequence
  Synthetic
gagcaagagcacauagaga

SEQ ID NO: 19379 - RNA, 19 nt, Artificial Sequence
  Synthetic
gaggagggacucagauuua

SEQ ID NO: 19380 - RNA, 19 nt, Artificial Sequence
  Synthetic
ucugaaagcucaaaguaau

SEQ ID NO: 19381 - RNA, 19 nt, Artificial Sequence
  Synthetic
gagaggagcaaaugugaau

SEQ ID NO: 19382 - RNA, 19 nt, Artificial Sequence
  Synthetic
gggaggacauuguggaacu

SEQ ID NO: 19383 - RNA, 19 nt, Artificial Sequence
  Synthetic
gaugaggaaacuaagguua

SEQ ID NO: 19384 - RNA, 19 nt, Artificial Sequence
  Synthetic
ugaucuaugucuacacaaa

SEQ ID NO: 19385 - RNA, 19 nt, Artificial Sequence
  Synthetic
cuaaaggagcagaugucaa

SEQ ID NO: 19386 - RNA, 19 nt, Artificial Sequence
  Synthetic
gcaaagcagccgagagaac

SEQ ID NO: 19387 - RNA, 19 nt, Artificial Sequence
  Synthetic
aagagcacauagagauuaa

SEQ ID NO: 19388 - RNA, 19 nt, Artificial Sequence
  Synthetic
gggcugcaguggaagacaa

SEQ ID NO: 19389 - RNA, 19 nt, Artificial Sequence
  Synthetic
cgaaauguccugucaucua

SEQ ID NO: 19390 - RNA, 19 nt, Artificial Sequence
  Synthetic
uaucaauggugcugagguu

SEQ ID NO: 19391 - RNA, 19 nt, Artificial Sequence
  Synthetic
acacagacagugauggcaa

SEQ ID NO: 19392 - RNA, 19 nt, Artificial Sequence
  Synthetic
gcagaaaugccuugaucca

SEQ ID NO: 19393 - RNA, 19 nt, Artificial Sequence
  Synthetic
guaaugagcaccuggacau

SEQ ID NO: 19394 - RNA, 19 nt, Artificial Sequence
  Synthetic
gcgaaaugguguagaagaa

SEQ ID NO: 19395 - RNA, 19 nt, Artificial Sequence
  Synthetic
gguuagaacaagagguaaa

SEQ ID NO: 19396 - RNA, 19 nt, Artificial Sequence
  Synthetic
caaccaagaaagagagaaa

SEQ ID NO: 19397 - RNA, 19 nt, Artificial Sequence
  Synthetic
gaaugaaagcugaagauua

SEQ ID NO: 19398 - RNA, 19 nt, Artificial Sequence
  Synthetic
acacaagauuugagaaaga

SEQ ID NO: 19399 - RNA, 19 nt, Artificial Sequence
  Synthetic
gauaaaagcuugcaggaaa

SEQ ID NO: 19400 - RNA, 19 nt, Artificial Sequence
  Synthetic
gagaguugcaagagagaaa

SEQ ID NO: 19401 - RNA, 19 nt, Artificial Sequence
  Synthetic
cgauuuaaguagugacauu

SEQ ID NO: 19402 - RNA, 19 nt, Artificial Sequence
  Synthetic
aagaaaggauggaggauga

SEQ ID NO: 19403 - RNA, 19 nt, Artificial Sequence
  Synthetic
gcuguaagauugaggaaga

SEQ ID NO: 19404 - RNA, 19 nt, Artificial Sequence
  Synthetic
ucacaaaggccaugaguuu

SEQ ID NO: 19405 - RNA, 19 nt, Artificial Sequence
  Synthetic
agacaagagauuacagaua

SEQ ID NO: 19406 - RNA, 19 nt, Artificial Sequence
  Synthetic
ugaaagaauuggaugaaga

SEQ ID NO: 19407 - RNA, 19 nt, Artificial Sequence
  Synthetic
cagcaaauccuaaugauaa

SEQ ID NO: 19408 - RNA, 19 nt, Artificial Sequence
  Synthetic
acgaaacaguauagaggaa

SEQ ID NO: 19409 - RNA, 19 nt, Artificial Sequence
  Synthetic
ugaagaaggcagaggaaga

SEQ ID NO: 19410 - RNA, 19 nt, Artificial Sequence
  Synthetic
gaaacaguauagaggaaau

SEQ ID NO: 19411 - RNA, 19 nt, Artificial Sequence
  Synthetic
agaagaagccaaugacuua

SEQ ID NO: 19412 - RNA, 19 nt, Artificial Sequence
  Synthetic
ggauggaggaugaaguuaa

SEQ ID NO: 19413 - RNA, 19 nt, Artificial Sequence
  Synthetic
aggcaaagucuguggcaau

SEQ ID NO: 19414 - RNA, 19 nt, Artificial Sequence
  Synthetic
cagcaaagagagugauauu

SEQ ID NO: 19415 - RNA, 19 nt, Artificial Sequence
  Synthetic
gguauuggacauagauaaa

SEQ ID NO: 19416 - RNA, 19 nt, Artificial Sequence
  Synthetic
gugcagaaccucaaacaua

SEQ ID NO: 19417 - RNA, 19 nt, Artificial Sequence
  Synthetic
aggcagaggaagaauauaa

SEQ ID NO: 19418 - RNA, 19 nt, Artificial Sequence
  Synthetic
uggaagaacagcugcauaa

SEQ ID NO: 19419 - RNA, 19 nt, Artificial Sequence
  Synthetic
gagaugagcaagucaauua

SEQ ID NO: 19420 - RNA, 19 nt, Artificial Sequence
  Synthetic
agagagugauauugagcaa

SEQ ID NO: 19421 - RNA, 19 nt, Artificial Sequence
  Synthetic
gggaaaucaaagaagaaau

SEQ ID NO: 19422 - RNA, 19 nt, Artificial Sequence
  Synthetic
gaaaaugagaagagaagaa

SEQ ID NO: 19423 - RNA, 19 nt, Artificial Sequence
  Synthetic
auaacaugcugcuggauaa

SEQ ID NO: 19424 - RNA, 19 nt, Artificial Sequence
  Synthetic
ugaaagaaauggagaagaa

SEQ ID NO: 19425 - RNA, 19 nt, Artificial Sequence
  Synthetic
gagaagaguuaaaggcuaa

SEQ ID NO: 19426 - RNA, 19 nt, Artificial Sequence
  Synthetic
ugaaagagcuggagaucaa

SEQ ID NO: 19427 - RNA, 19 nt, Artificial Sequence
  Synthetic
ugaagaaagucaagagauu

SEQ ID NO: 19428 - RNA, 19 nt, Artificial Sequence
  Synthetic
gaagauaaaucgugcacua

SEQ ID NO: 19429 - RNA, 19 nt, Artificial Sequence
  Synthetic
gcauuaagacaguuagaaa

SEQ ID NO: 19430 - RNA, 19 nt, Artificial Sequence
  Synthetic
ggauaaacauggacaucua

SEQ ID NO: 19431 - RNA, 19 nt, Artificial Sequence
  Synthetic
guaaagaauugcagcagaa

SEQ ID NO: 19432 - RNA, 19 nt, Artificial Sequence
  Synthetic
ugaaagagcuccaggauca

SEQ ID NO: 19433 - RNA, 19 nt, Artificial Sequence
  Synthetic
ucaaauauccacugagaaa

SEQ ID NO: 19434 - RNA, 19 nt, Artificial Sequence
  Synthetic
gaaagauguucaagagcaa

SEQ ID NO: 19435 - RNA, 19 nt, Artificial Sequence
  Synthetic
gaucaguggcauugggaua

SEQ ID NO: 19436 - RNA, 19 nt, Artificial Sequence
  Synthetic
ugggauaacauaagagaaa

SEQ ID NO: 19437 - RNA, 19 nt, Artificial Sequence
  Synthetic
acaacaugcucuuggauaa

SEQ ID NO: 19438 - RNA, 19 nt, Artificial Sequence
  Synthetic
ggagauuaccuuacggaaa

SEQ ID NO: 19439 - RNA, 19 nt, Artificial Sequence
  Synthetic
aagaagaagcugaacauaa

SEQ ID NO: 19440 - RNA, 19 nt, Artificial Sequence
  Synthetic
cagaaagaacugaaugaaa

SEQ ID NO: 19441 - RNA, 19 nt, Artificial Sequence
  Synthetic
caguaaagacagugacauu

SEQ ID NO: 19442 - RNA, 19 nt, Artificial Sequence
  Synthetic
ccaaagaggaacuggaaca

SEQ ID NO: 19443 - RNA, 19 nt, Artificial Sequence
  Synthetic
ccaaugaaggagaaaguaa

SEQ ID NO: 19444 - RNA, 19 nt, Artificial Sequence
  Synthetic
cuaugaagcuucuuaguaa

SEQ ID NO: 19445 - RNA, 19 nt, Artificial Sequence
  Synthetic
ggaugaaaccaaugcuuua

SEQ ID NO: 19446 - RNA, 19 nt, Artificial Sequence
  Synthetic
ccacaagggacaugaguuu

SEQ ID NO: 19447 - RNA, 19 nt, Artificial Sequence
  Synthetic
gggaagaaguggccucaaa

SEQ ID NO: 19448 - RNA, 19 nt, Artificial Sequence
  Synthetic
gguaaagacauuugugauu

SEQ ID NO: 19449 - RNA, 19 nt, Artificial Sequence
  Synthetic
gaugauggcuagacacaaa

SEQ ID NO: 19450 - RNA, 19 nt, Artificial Sequence
  Synthetic
guuagaaaccugacauuaa

SEQ ID NO: 19451 - RNA, 19 nt, Artificial Sequence
  Synthetic
gagcagcagaaguggguua

SEQ ID NO: 19452 - RNA, 19 nt, Artificial Sequence
  Synthetic
ggagaaaagagaaggagaa

SEQ ID NO: 19453 - RNA, 19 nt, Artificial Sequence
  Synthetic
ccaucaacguggagagcuu

SEQ ID NO: 19454 - RNA, 19 nt, Artificial Sequence
  Synthetic
gagcaaggcuaaagagcua

SEQ ID NO: 19455 - RNA, 19 nt, Artificial Sequence
  Synthetic
ugauugagauggugagaaa

SEQ ID NO: 19456 - RNA, 19 nt, Artificial Sequence
  Synthetic
cauauaaacccaagagcaa

SEQ ID NO: 19457 - RNA, 19 nt, Artificial Sequence
  Synthetic
cugcaaagucucugggaau

SEQ ID NO: 19458 - RNA, 19 nt, Artificial Sequence
  Synthetic
acuacaggguccagaguaa

SEQ ID NO: 19459 - RNA, 19 nt, Artificial Sequence
  Synthetic
gggaagagcccguggaugu

SEQ ID NO: 19460 - RNA, 19 nt, Artificial Sequence
  Synthetic
gagaauguccugugucaaa

SEQ ID NO: 19461 - RNA, 19 nt, Artificial Sequence
  Synthetic
gugaaauccuggagaaugu

SEQ ID NO: 19462 - RNA, 19 nt, Artificial Sequence
  Synthetic
cggaauaaccagaagucau

SEQ ID NO: 19463 - RNA, 19 nt, Artificial Sequence
  Synthetic
gcacauugcaauucagauu

SEQ ID NO: 19464 - RNA, 19 nt, Artificial Sequence
  Synthetic
cccaauaccuccuggauau

SEQ ID NO: 19465 - RNA, 19 nt, Artificial Sequence
  Synthetic
gugcaagauuuauuggcaa

SEQ ID NO: 19466 - RNA, 19 nt, Artificial Sequence
  Synthetic
gugccagcccagugaguaa

SEQ ID NO: 19467 - RNA, 19 nt, Artificial Sequence
  Synthetic
uauuuuaaucggagagcaa

SEQ ID NO: 19468 - RNA, 19 nt, Artificial Sequence
  Synthetic
gagagcaacuucauguaaa

SEQ ID NO: 19469 - RNA, 19 nt, Artificial Sequence
  Synthetic
gauccaaucaggaagcaaa

SEQ ID NO: 19470 - RNA, 19 nt, Artificial Sequence
  Synthetic
uggcagauccuauaaauaa

SEQ ID NO: 19471 - RNA, 19 nt, Artificial Sequence
  Synthetic
ccuugaaagacuauaacaa

SEQ ID NO: 19472 - RNA, 19 nt, Artificial Sequence
  Synthetic
caaaggauuccaaggagaa

SEQ ID NO: 19473 - RNA, 19 nt, Artificial Sequence
  Synthetic
gcaacuucauguaaagauu

SEQ ID NO: 19474 - RNA, 19 nt, Artificial Sequence
  Synthetic
ggcagauccuauaaauaaa

SEQ ID NO: 19475 - RNA, 19 nt, Artificial Sequence
  Synthetic
ucuaggagaccaagauuua

SEQ ID NO: 19476 - RNA, 19 nt, Artificial Sequence
  Synthetic
caagugaacucaacaaaga

SEQ ID NO: 19477 - RNA, 19 nt, Artificial Sequence
  Synthetic
cagaugaguaugaagaaga

SEQ ID NO: 19478 - RNA, 19 nt, Artificial Sequence
  Synthetic
ucaaaggauuccaaggaga

SEQ ID NO: 19479 - RNA, 19 nt, Artificial Sequence
  Synthetic
aguaugaagaagauggauu

SEQ ID NO: 19480 - RNA, 19 nt, Artificial Sequence
  Synthetic
ccucagaaccagcgauuca

SEQ ID NO: 19481 - RNA, 19 nt, Artificial Sequence
  Synthetic
ggauggaauuucaacaaga

SEQ ID NO: 19482 - RNA, 19 nt, Artificial Sequence
  Synthetic
gcauauaaacccaagagca

SEQ ID NO: 19483 - RNA, 19 nt, Artificial Sequence
  Synthetic
ugaagaugggacugugaaa

SEQ ID NO: 19484 - RNA, 19 nt, Artificial Sequence
  Synthetic
cggaauaagcagaaggcau

SEQ ID NO: 19485 - RNA, 19 nt, Artificial Sequence
  Synthetic
ugucauauauggagugaau

SEQ ID NO: 19486 - RNA, 19 nt, Artificial Sequence
  Synthetic
gcaccagcccagugagcaa

SEQ ID NO: 19487 - RNA, 19 nt, Artificial Sequence
  Synthetic
ggaauaagggccugcaaaa

SEQ ID NO: 19488 - RNA, 19 nt, Artificial Sequence
  Synthetic
aaugggaguuccugagaua

SEQ ID NO: 19489 - RNA, 19 nt, Artificial Sequence
  Synthetic
gggaauaagggccugcaaa

SEQ ID NO: 19490 - RNA, 19 nt, Artificial Sequence
  Synthetic
aagcagaggaggaggagga

SEQ ID NO: 19491 - RNA, 19 nt, Artificial Sequence
  Synthetic
ucaaaacgcugaaggacaa

SEQ ID NO: 19492 - RNA, 19 nt, Artificial Sequence
  Synthetic
ggaauaagcagaaggcauc

SEQ ID NO: 19493 - RNA, 19 nt, Artificial Sequence
  Synthetic
ucaaagaaacugacagcuu

SEQ ID NO: 19494 - RNA, 19 nt, Artificial Sequence
  Synthetic
acgacaagcugaacgugaa

SEQ ID NO: 19495 - RNA, 19 nt, Artificial Sequence
  Synthetic
gcaaugugcuaguguacga

SEQ ID NO: 19496 - RNA, 19 nt, Artificial Sequence
  Synthetic
aggccaaacucaaagagau

SEQ ID NO: 19497 - RNA, 19 nt, Artificial Sequence
  Synthetic
acuacaagcugcuggggaa

SEQ ID NO: 19498 - RNA, 19 nt, Artificial Sequence
  Synthetic
guccaaggccagacggcaa

SEQ ID NO: 19499 - RNA, 19 nt, Artificial Sequence
  Synthetic
ggcauggauuacagaggaa

SEQ ID NO: 19500 - RNA, 19 nt, Artificial Sequence
  Synthetic
aaucauguacagagcuuaa

SEQ ID NO: 19501 - RNA, 19 nt, Artificial Sequence
  Synthetic
cagcaaaugccuuucaaga

SEQ ID NO: 19502 - RNA, 19 nt, Artificial Sequence
  Synthetic
aggaugugguggagaugau

SEQ ID NO: 19503 - RNA, 19 nt, Artificial Sequence
  Synthetic
cagugagcaaugugagcaa

SEQ ID NO: 19504 - RNA, 19 nt, Artificial Sequence
  Synthetic
ccuaacgugcgguggcuaa

SEQ ID NO: 19505 - RNA, 19 nt, Artificial Sequence
  Synthetic
ggaaagucuacaaagguca

SEQ ID NO: 19506 - RNA, 19 nt, Artificial Sequence
  Synthetic
gguccaacgcacagcccaa

SEQ ID NO: 19507 - RNA, 19 nt, Artificial Sequence
  Synthetic
guucagaggaagcaguauu

SEQ ID NO: 19508 - RNA, 19 nt, Artificial Sequence
  Synthetic
ccaauaaagugaaacaaag

SEQ ID NO: 19509 - RNA, 19 nt, Artificial Sequence
  Synthetic
ucauggaggagcugggaga

SEQ ID NO: 19510 - RNA, 19 nt, Artificial Sequence
  Synthetic
ggugcuuuacgcagaauaa

SEQ ID NO: 19511 - RNA, 19 nt, Artificial Sequence
  Synthetic
uuuggaauguucagaggaa

SEQ ID NO: 19512 - RNA, 19 nt, Artificial Sequence
  Synthetic
gauuacagaggaacggcaa

SEQ ID NO: 19513 - RNA, 19 nt, Artificial Sequence
  Synthetic
ggccaaacucaaagagauc

SEQ ID NO: 19514 - RNA, 19 nt, Artificial Sequence
  Synthetic
gcucaaacaucgaggaaau

SEQ ID NO: 19515 - RNA, 19 nt, Artificial Sequence
  Synthetic
ggagaaagcugaagauaau

SEQ ID NO: 19516 - RNA, 19 nt, Artificial Sequence
  Synthetic
gggagaaagcugaagauaa

SEQ ID NO: 19517 - RNA, 19 nt, Artificial Sequence
  Synthetic
ccagaaagcuuuaagacaa

SEQ ID NO: 19518 - RNA, 19 nt, Artificial Sequence
  Synthetic
uuacagagguucaggauua

SEQ ID NO: 19519 - RNA, 19 nt, Artificial Sequence
  Synthetic
gcuuauaaacgaagacaaa

SEQ ID NO: 19520 - RNA, 19 nt, Artificial Sequence
  Synthetic
ugucaguguuggagaguua

SEQ ID NO: 19521 - RNA, 19 nt, Artificial Sequence
  Synthetic
gaaauagagaguugagaua

SEQ ID NO: 19522 - RNA, 19 nt, Artificial Sequence
  Synthetic
cagaaagcuuuaagacaaa

SEQ ID NO: 19523 - RNA, 19 nt, Artificial Sequence
  Synthetic
gguuauaacuuaaggcuga

SEQ ID NO: 19524 - RNA, 19 nt, Artificial Sequence
  Synthetic
agaaagagcacuucaaaua

SEQ ID NO: 19525 - RNA, 19 nt, Artificial Sequence
  Synthetic
gcacaagagaucugggcaa

SEQ ID NO: 19526 - RNA, 19 nt, Artificial Sequence
  Synthetic
caacauaccugguuuauua

SEQ ID NO: 19527 - RNA, 19 nt, Artificial Sequence
  Synthetic
gguaauugcucuaacuuua

SEQ ID NO: 19528 - RNA, 19 nt, Artificial Sequence
  Synthetic
ggacagaaguuuccaauuu

SEQ ID NO: 19529 - RNA, 19 nt, Artificial Sequence
  Synthetic
guggaaagcaccagacuaa

SEQ ID NO: 19530 - RNA, 19 nt, Artificial Sequence
  Synthetic
cauuuaggauugaaggaaa

SEQ ID NO: 19531 - RNA, 19 nt, Artificial Sequence
  Synthetic
cuacagaaguggaaauaca

SEQ ID NO: 19532 - RNA, 19 nt, Artificial Sequence
  Synthetic
guuuauaagacgggagaaa

SEQ ID NO: 19533 - RNA, 19 nt, Artificial Sequence
  Synthetic
gugcagaagcugugcguau

SEQ ID NO: 19534 - RNA, 19 nt, Artificial Sequence
  Synthetic
aaacaacaguggagucaua

SEQ ID NO: 19535 - RNA, 19 nt, Artificial Sequence
  Synthetic
cgagaaggguuaaacuaua

SEQ ID NO: 19536 - RNA, 19 nt, Artificial Sequence
  Synthetic
ggaacaaaccuaagcauga

SEQ ID NO: 19537 - RNA, 19 nt, Artificial Sequence
  Synthetic
ccaaauggaccuaaagaau

SEQ ID NO: 19538 - RNA, 19 nt, Artificial Sequence
  Synthetic
uggaaagacauaugugaua

SEQ ID NO: 19539 - RNA, 19 nt, Artificial Sequence
  Synthetic
guuuaacacaccagagaaa

SEQ ID NO: 19540 - RNA, 19 nt, Artificial Sequence
  Synthetic
gaguaguggugguuuauaa

SEQ ID NO: 19541 - RNA, 19 nt, Artificial Sequence
  Synthetic
cuaaagaaucaguccguua

SEQ ID NO: 19542 - RNA, 19 nt, Artificial Sequence
  Synthetic
cugauaaugagaugggaua

SEQ ID NO: 19543 - RNA, 19 nt, Artificial Sequence
  Synthetic
ggauucaguugguggauau

SEQ ID NO: 19544 - RNA, 19 nt, Artificial Sequence
  Synthetic
ggaccaagauggagagaga

SEQ ID NO: 19545 - RNA, 19 nt, Artificial Sequence
  Synthetic
gaacacaguuucagagaca

SEQ ID NO: 19546 - RNA, 19 nt, Artificial Sequence
  Synthetic
cuaugaaggugcugaagaa

SEQ ID NO: 19547 - RNA, 19 nt, Artificial Sequence
  Synthetic
gggaaggaccggaaggaga

SEQ ID NO: 19548 - RNA, 19 nt, Artificial Sequence
  Synthetic
ccauugaccacgagaagaa

SEQ ID NO: 19549 - RNA, 19 nt, Artificial Sequence
  Synthetic
ggaaauuggaacacaguuu

SEQ ID NO: 19550 - RNA, 19 nt, Artificial Sequence
  Synthetic
ugaaagauguguaugauga

SEQ ID NO: 19551 - RNA, 19 nt, Artificial Sequence
  Synthetic
acaccaugcuggcaggaua

SEQ ID NO: 19552 - RNA, 19 nt, Artificial Sequence
  Synthetic
aggaggaugugaaguuuua

SEQ ID NO: 19553 - RNA, 19 nt, Artificial Sequence
  Synthetic
cggaggaggaugugaaguu

SEQ ID NO: 19554 - RNA, 19 nt, Artificial Sequence
  Synthetic
caucaaacucacugacuuu

SEQ ID NO: 19555 - RNA, 19 nt, Artificial Sequence
  Synthetic
gauaagagcaagcgggauc

SEQ ID NO: 19556 - RNA, 19 nt, Artificial Sequence
  Synthetic
gcaaagaggccauugacca

SEQ ID NO: 19557 - RNA, 19 nt, Artificial Sequence
  Synthetic
gugacacaccagaggaaau

SEQ ID NO: 19558 - RNA, 19 nt, Artificial Sequence
  Synthetic
ugauggaagacgacggcaa

SEQ ID NO: 19559 - RNA, 19 nt, Artificial Sequence
  Synthetic
acguguaccuggugacaga

SEQ ID NO: 19560 - RNA, 19 nt, Artificial Sequence
  Synthetic
ccuuccagaccgagggcaa

SEQ ID NO: 19561 - RNA, 19 nt, Artificial Sequence
  Synthetic
ccagagagaggauguggaa

SEQ ID NO: 19562 - RNA, 19 nt, Artificial Sequence
  Synthetic
ggaaagcgauucacuguau

SEQ ID NO: 19563 - RNA, 19 nt, Artificial Sequence
  Synthetic
gcaucaaccaccauggauu

SEQ ID NO: 19564 - RNA, 19 nt, Artificial Sequence
  Synthetic
ggugcuagcuugacagagu

SEQ ID NO: 19565 - RNA, 19 nt, Artificial Sequence
  Synthetic
uguguaugaugauggcaaa

SEQ ID NO: 19566 - RNA, 19 nt, Artificial Sequence
  Synthetic
cguccaaggaugagggcgu

SEQ ID NO: 19567 - RNA, 19 nt, Artificial Sequence
  Synthetic
uggcaaaacuguggaguau

SEQ ID NO: 19568 - RNA, 19 nt, Artificial Sequence
  Synthetic
ccaccggccugauggaaga

SEQ ID NO: 19569 - RNA, 19 nt, Artificial Sequence
  Synthetic
acagagaccucaagccuga

SEQ ID NO: 19570 - RNA, 19 nt, Artificial Sequence
  Synthetic
cagaggaaaucaagcggca

SEQ ID NO: 19571 - RNA, 19 nt, Artificial Sequence
  Synthetic
agagagacauccuggcuga

SEQ ID NO: 19572 - RNA, 19 nt, Artificial Sequence
  Synthetic
ggaaggagaccaugacacu

SEQ ID NO: 19573 - RNA, 19 nt, Artificial Sequence
  Synthetic
gugacggcuacgugguaaa

SEQ ID NO: 19574 - RNA, 19 nt, Artificial Sequence
  Synthetic
gaucgaagauggagagaga

SEQ ID NO: 19575 - RNA, 19 nt, Artificial Sequence
  Synthetic
gcugaagguuuuaggacaa

SEQ ID NO: 19576 - RNA, 19 nt, Artificial Sequence
  Synthetic
ccagguacccggugggaaa

SEQ ID NO: 19577 - RNA, 19 nt, Artificial Sequence
  Synthetic
cuaaagacgucguguccaa

SEQ ID NO: 19578 - RNA, 19 nt, Artificial Sequence
  Synthetic
ggacaaggauccuauggaa

SEQ ID NO: 19579 - RNA, 19 nt, Artificial Sequence
  Synthetic
gggaaggacaggaaggaga

SEQ ID NO: 19580 - RNA, 19 nt, Artificial Sequence
  Synthetic
cggaagagauugagauccu

SEQ ID NO: 19581 - RNA, 19 nt, Artificial Sequence
  Synthetic
ucgaagauggagagagaca

SEQ ID NO: 19582 - RNA, 19 nt, Artificial Sequence
  Synthetic
ucaccaagaccauggacua

SEQ ID NO: 19583 - RNA, 19 nt, Artificial Sequence
  Synthetic
gacaaggauccuauggaaa

SEQ ID NO: 19584 - RNA, 19 nt, Artificial Sequence
  Synthetic
ggaagaaggugucgugaag

SEQ ID NO: 19585 - RNA, 19 nt, Artificial Sequence
  Synthetic
agagagacaucuuggcaga

SEQ ID NO: 19586 - RNA, 19 nt, Artificial Sequence
  Synthetic
gcuacgagaucaaggagga

SEQ ID NO: 19587 - RNA, 19 nt, Artificial Sequence
  Synthetic
ccugaagcgucaaggcuau

SEQ ID NO: 19588 - RNA, 19 nt, Artificial Sequence
  Synthetic
ggacaggagcgaugcacuu

SEQ ID NO: 19589 - RNA, 19 nt, Artificial Sequence
  Synthetic
uugacggaguggaggaaau

SEQ ID NO: 19590 - RNA, 19 nt, Artificial Sequence
  Synthetic
gcgauggaccugagcauga

SEQ ID NO: 19591 - RNA, 19 nt, Artificial Sequence
  Synthetic
gcaaaugggccagacgaua

SEQ ID NO: 19592 - RNA, 19 nt, Artificial Sequence
  Synthetic
cagauuucggccugaguaa

SEQ ID NO: 19593 - RNA, 19 nt, Artificial Sequence
  Synthetic
gauaagagcaagagagacc

SEQ ID NO: 19594 - RNA, 19 nt, Artificial Sequence
  Synthetic
ccgaguaugccgugaagau

SEQ ID NO: 19595 - RNA, 19 nt, Artificial Sequence
  Synthetic
gcuccuacucagugugcaa

SEQ ID NO: 19596 - RNA, 19 nt, Artificial Sequence
  Synthetic
ggaacacgcuguaccggaa

SEQ ID NO: 19597 - RNA, 19 nt, Artificial Sequence
  Synthetic
gugcauaaagccacagaca

SEQ ID NO: 19598 - RNA, 19 nt, Artificial Sequence
  Synthetic
gaaacugugaauuggagaa

SEQ ID NO: 19599 - RNA, 19 nt, Artificial Sequence
  Synthetic
aggaggaugucaaguucua

SEQ ID NO: 19600 - RNA, 19 nt, Artificial Sequence
  Synthetic
aagaaggugucgugaagga

SEQ ID NO: 19601 - RNA, 19 nt, Artificial Sequence
  Synthetic
gcagaggcaugaagagacu

SEQ ID NO: 19602 - RNA, 19 nt, Artificial Sequence
  Synthetic
cggcgaugcaagugcucaa

SEQ ID NO: 19603 - RNA, 19 nt, Artificial Sequence
  Synthetic
uugauaagagcaagagaga

SEQ ID NO: 19604 - RNA, 19 nt, Artificial Sequence
  Synthetic
ccaugaagguauugaagaa

SEQ ID NO: 19605 - RNA, 19 nt, Artificial Sequence
  Synthetic
guauauggcuccagaagua

SEQ ID NO: 19606 - RNA, 19 nt, Artificial Sequence
  Synthetic
acgaauagguagcggaaaa

SEQ ID NO: 19607 - RNA, 19 nt, Artificial Sequence
  Synthetic
cuacauagccugggaauaa

SEQ ID NO: 19608 - RNA, 19 nt, Artificial Sequence
  Synthetic
ggaaaagaucgaaaagaaa

SEQ ID NO: 19609 - RNA, 19 nt, Artificial Sequence
  Synthetic
ugggagaggaggagauuaa

SEQ ID NO: 19610 - RNA, 19 nt, Artificial Sequence
  Synthetic
agauggaguugaagaaauu

SEQ ID NO: 19611 - RNA, 19 nt, Artificial Sequence
  Synthetic
cagaagaagaugucaaauu

SEQ ID NO: 19612 - RNA, 19 nt, Artificial Sequence
  Synthetic
caaaggaccuggugucaaa

SEQ ID NO: 19613 - RNA, 19 nt, Artificial Sequence
  Synthetic
gaggugaauugcuggauaa

SEQ ID NO: 19614 - RNA, 19 nt, Artificial Sequence
  Synthetic
aggaaaagaucgaaaagaa

SEQ ID NO: 19615 - RNA, 19 nt, Artificial Sequence
  Synthetic
gagaauggacagcaaauua

SEQ ID NO: 19616 - RNA, 19 nt, Artificial Sequence
  Synthetic
ggaauaaacuguauagaag

SEQ ID NO: 19617 - RNA, 19 nt, Artificial Sequence
  Synthetic
cagauggaguugaagaaau

SEQ ID NO: 19618 - RNA, 19 nt, Artificial Sequence
  Synthetic
gaagaaggccacacugaaa

SEQ ID NO: 19619 - RNA, 19 nt, Artificial Sequence
  Synthetic
gggcaggccugaagauaca

SEQ ID NO: 19620 - RNA, 19 nt, Artificial Sequence
  Synthetic
auaucuugguagagguuaa

SEQ ID NO: 19621 - RNA, 19 nt, Artificial Sequence
  Synthetic
cagauuaggugcaggacca

SEQ ID NO: 19622 - RNA, 19 nt, Artificial Sequence
  Synthetic
auacaaugcuuaccgguua

SEQ ID NO: 19623 - RNA, 19 nt, Artificial Sequence
  Synthetic
gcgaaauccugcaaacaga

SEQ ID NO: 19624 - RNA, 19 nt, Artificial Sequence
  Synthetic
acugaaaguucgagaccga

SEQ ID NO: 19625 - RNA, 19 nt, Artificial Sequence
  Synthetic
cggccuaaguaaagagucu

SEQ ID NO: 19626 - RNA, 19 nt, Artificial Sequence
  Synthetic
ucacagaagaagaugucaa

SEQ ID NO: 19627 - RNA, 19 nt, Artificial Sequence
  Synthetic
gaagggaaguuguaucuua

SEQ ID NO: 19628 - RNA, 19 nt, Artificial Sequence
  Synthetic
ggaggugaauugcuggaua

SEQ ID NO: 19629 - RNA, 19 nt, Artificial Sequence
  Synthetic
gcagugaagauuauugaua

SEQ ID NO: 19630 - RNA, 19 nt, Artificial Sequence
  Synthetic
gugaauugcuggauaaaau

SEQ ID NO: 19631 - RNA, 19 nt, Artificial Sequence
  Synthetic
aguuaaucgucgaggucau

SEQ ID NO: 19632 - RNA, 19 nt, Artificial Sequence
  Synthetic
gcagacaguugguguacau

SEQ ID NO: 19633 - RNA, 19 nt, Artificial Sequence
  Synthetic
uggaugaaccuaugggaga

SEQ ID NO: 19634 - RNA, 19 nt, Artificial Sequence
  Synthetic
ccaugaaggugcugcgcaa

SEQ ID NO: 19635 - RNA, 19 nt, Artificial Sequence
  Synthetic
agacagagcagaaguauuu

SEQ ID NO: 19636 - RNA, 19 nt, Artificial Sequence
  Synthetic
cggccgagaucaugugcaa

SEQ ID NO: 19637 - RNA, 19 nt, Artificial Sequence
  Synthetic
cccgaaucuuucagggaua

SEQ ID NO: 19638 - RNA, 19 nt, Artificial Sequence
  Synthetic
ggcugaagcucgagggacu

SEQ ID NO: 19639 - RNA, 19 nt, Artificial Sequence
  Synthetic
gggacgaggacgacgauga

SEQ ID NO: 19640 - RNA, 19 nt, Artificial Sequence
  Synthetic
ugaccgggcacgaggagaa

SEQ ID NO: 19641 - RNA, 19 nt, Artificial Sequence
  Synthetic
aggugagcguggagaacuu

SEQ ID NO: 19642 - RNA, 19 nt, Artificial Sequence
  Synthetic
gggcacaagaaguccggaa

SEQ ID NO: 19643 - RNA, 19 nt, Artificial Sequence
  Synthetic
agaaggugagcguggagaa

SEQ ID NO: 19644 - RNA, 19 nt, Artificial Sequence
  Synthetic
accugaaacuggagaaugu

SEQ ID NO: 19645 - RNA, 19 nt, Artificial Sequence
  Synthetic
gaaaucauccguagcaaga

SEQ ID NO: 19646 - RNA, 19 nt, Artificial Sequence
  Synthetic
cuggagggcgagaggaaca

SEQ ID NO: 19647 - RNA, 19 nt, Artificial Sequence
  Synthetic
gggcacgaggagaagguga

SEQ ID NO: 19648 - RNA, 19 nt, Artificial Sequence
  Synthetic
cagagcuggaugugggcaa

SEQ ID NO: 19649 - RNA, 19 nt, Artificial Sequence
  Synthetic
cggacuucgggcugagcaa

SEQ ID NO: 19650 - RNA, 19 nt, Artificial Sequence
  Synthetic
accucaagccggagaacau

SEQ ID NO: 19651 - RNA, 19 nt, Artificial Sequence
  Synthetic
gccaggaguucgcagucaa

SEQ ID NO: 19652 - RNA, 19 nt, Artificial Sequence
  Synthetic
ccgaaaucauccguagcaa

SEQ ID NO: 19653 - RNA, 19 nt, Artificial Sequence
  Synthetic
gcaauuacguccaccaaag

SEQ ID NO: 19654 - RNA, 19 nt, Artificial Sequence
  Synthetic
gcacaagcucggcaucauu

SEQ ID NO: 19655 - RNA, 19 nt, Artificial Sequence
  Synthetic
ggacugcuccaacaggaaa

SEQ ID NO: 19656 - RNA, 19 nt, Artificial Sequence
  Synthetic
cacaagaaguccggaacca

SEQ ID NO: 19657 - RNA, 19 nt, Artificial Sequence
  Synthetic
gagccuacggcaagguguu

SEQ ID NO: 19658 - RNA, 19 nt, Artificial Sequence
  Synthetic
gggagggcuucuuccugaa

SEQ ID NO: 19659 - RNA, 19 nt, Artificial Sequence
  Synthetic
ugaagagcguggagaaugc

SEQ ID NO: 19660 - RNA, 19 nt, Artificial Sequence
  Synthetic
acgaccagcugcacacgua

SEQ ID NO: 19661 - RNA, 19 nt, Artificial Sequence
  Synthetic
ccaccuucauggcauucaa

SEQ ID NO: 19662 - RNA, 19 nt, Artificial Sequence
  Synthetic
gggacccucugaagcauuu

SEQ ID NO: 19663 - RNA, 19 nt, Artificial Sequence
  Synthetic
uggacugucugugcaauua

SEQ ID NO: 19664 - RNA, 19 nt, Artificial Sequence
  Synthetic
gcagaagaguucacagaaa

SEQ ID NO: 19665 - RNA, 19 nt, Artificial Sequence
  Synthetic
ggaaauaacagcucugaaa

SEQ ID NO: 19666 - RNA, 19 nt, Artificial Sequence
  Synthetic
gagcaaagguuccuguaaa

SEQ ID NO: 19667 - RNA, 19 nt, Artificial Sequence
  Synthetic
gauuuauguuggagagauu

SEQ ID NO: 19668 - RNA, 19 nt, Artificial Sequence
  Synthetic
gcugagauaucuaggagaa

SEQ ID NO: 19669 - RNA, 19 nt, Artificial Sequence
  Synthetic
aaugagugcuuuagcgaaa

SEQ ID NO: 19670 - RNA, 19 nt, Artificial Sequence
  Synthetic
gcccagagcucuugaauca

SEQ ID NO: 19671 - RNA, 19 nt, Artificial Sequence
  Synthetic
gaacuggagcuuauggaaa

SEQ ID NO: 19672 - RNA, 19 nt, Artificial Sequence
  Synthetic
uauaaaugguggugaacuu

SEQ ID NO: 19673 - RNA, 19 nt, Artificial Sequence
  Synthetic
ccuaggaacuggagcuuau

SEQ ID NO: 19674 - RNA, 19 nt, Artificial Sequence
  Synthetic
ccaagaaaugagugcuuua

SEQ ID NO: 19675 - RNA, 19 nt, Artificial Sequence
  Synthetic
cagaagaguucacagaaau

SEQ ID NO: 19676 - RNA, 19 nt, Artificial Sequence
  Synthetic
ccuaugacuuguuuggaaa

SEQ ID NO: 19677 - RNA, 19 nt, Artificial Sequence
  Synthetic
gcaaaaggauggaagccaa

SEQ ID NO: 19678 - RNA, 19 nt, Artificial Sequence
  Synthetic
guaaggaguuuguggcuga

SEQ ID NO: 19679 - RNA, 19 nt, Artificial Sequence
  Synthetic
gcguaaugcagcugucaua

SEQ ID NO: 19680 - RNA, 19 nt, Artificial Sequence
  Synthetic
cagaugaaaucaaagaaca

SEQ ID NO: 19681 - RNA, 19 nt, Artificial Sequence
  Synthetic
agcaugaggugcagauuua

SEQ ID NO: 19682 - RNA, 19 nt, Artificial Sequence
  Synthetic
ccagcuacaucaugaggaa

SEQ ID NO: 19683 - RNA, 19 nt, Artificial Sequence
  Synthetic
gagaaggugggaauagaaa

SEQ ID NO: 19684 - RNA, 19 nt, Artificial Sequence
  Synthetic
ggccagagcgggaaagaga

SEQ ID NO: 19685 - RNA, 19 nt, Artificial Sequence
  Synthetic
gagaacuguuugagcgcau

SEQ ID NO: 19686 - RNA, 19 nt, Artificial Sequence
  Synthetic
ugagauaucuaggagaaua

SEQ ID NO: 19687 - RNA, 19 nt, Artificial Sequence
  Synthetic
gucgaaagugugugcauaa

SEQ ID NO: 19688 - RNA, 19 nt, Artificial Sequence
  Synthetic
auacauggcaccagauauu

SEQ ID NO: 19689 - RNA, 19 nt, Artificial Sequence
  Synthetic
gcucaaaaguucugaauuc

SEQ ID NO: 19690 - RNA, 19 nt, Artificial Sequence
  Synthetic
gcuuguaagucacagguuu

SEQ ID NO: 19691 - RNA, 19 nt, Artificial Sequence
  Synthetic
cacaguagauccaaacaaa

SEQ ID NO: 19692 - RNA, 19 nt, Artificial Sequence
  Synthetic
cccaagaggcuaaagauuu

SEQ ID NO: 19693 - RNA, 19 nt, Artificial Sequence
  Synthetic
ucacagagcaugaggugca

SEQ ID NO: 19694 - RNA, 19 nt, Artificial Sequence
  Synthetic
ggacaaagauggagaggga

SEQ ID NO: 19695 - RNA, 19 nt, Artificial Sequence
  Synthetic
aaugaaaggaggagaguua

SEQ ID NO: 19696 - RNA, 19 nt, Artificial Sequence
  Synthetic
acaaagauggagagggaua

SEQ ID NO: 19697 - RNA, 19 nt, Artificial Sequence
  Synthetic
gcaaauauugacugggaua

SEQ ID NO: 19698 - RNA, 19 nt, Artificial Sequence
  Synthetic
cagaaggaguugaagaaau

SEQ ID NO: 19699 - RNA, 19 nt, Artificial Sequence
  Synthetic
gcguauaggcaauggaaaa

SEQ ID NO: 19700 - RNA, 19 nt, Artificial Sequence
  Synthetic
guauauggcuccugaagua

SEQ ID NO: 19701 - RNA, 19 nt, Artificial Sequence
  Synthetic
uaaggaaggcuaugagaaa

SEQ ID NO: 19702 - RNA, 19 nt, Artificial Sequence
  Synthetic
agaaaugagaccaugaaua

SEQ ID NO: 19703 - RNA, 19 nt, Artificial Sequence
  Synthetic
cagaggaagaugugaaauu

SEQ ID NO: 19704 - RNA, 19 nt, Artificial Sequence
  Synthetic
gaaaugagaccaugaauau

SEQ ID NO: 19705 - RNA, 19 nt, Artificial Sequence
  Synthetic
ugauacuccugaagagaua

SEQ ID NO: 19706 - RNA, 19 nt, Artificial Sequence
  Synthetic
gggauauacugguggaagu

SEQ ID NO: 19707 - RNA, 19 nt, Artificial Sequence
  Synthetic
guauacugcugaacaaaua

SEQ ID NO: 19708 - RNA, 19 nt, Artificial Sequence
  Synthetic
uuaaagcacucauggauaa

SEQ ID NO: 19709 - RNA, 19 nt, Artificial Sequence
  Synthetic
ggacaauauuucagacgga

SEQ ID NO: 19710 - RNA, 19 nt, Artificial Sequence
  Synthetic
gcgguauacugcugaacaa

SEQ ID NO: 19711 - RNA, 19 nt, Artificial Sequence
  Synthetic
gaacgggaggcuagugaua

SEQ ID NO: 19712 - RNA, 19 nt, Artificial Sequence
  Synthetic
ugaugaaggaguuguuaaa

SEQ ID NO: 19713 - RNA, 19 nt, Artificial Sequence
  Synthetic
acgggaggcuagugauaua

SEQ ID NO: 19714 - RNA, 19 nt, Artificial Sequence
  Synthetic
gauaugugauuuuggguuu

SEQ ID NO: 19715 - RNA, 19 nt, Artificial Sequence
  Synthetic
cgagguaaauggucuuaaa

SEQ ID NO: 19716 - RNA, 19 nt, Artificial Sequence
  Synthetic
gguaaagacagaaaugaga

SEQ ID NO: 19717 - RNA, 19 nt, Artificial Sequence
  Synthetic
ugaaggaguuguuaaagaa

SEQ ID NO: 19718 - RNA, 19 nt, Artificial Sequence
  Synthetic
cagugaagaucauugacaa

SEQ ID NO: 19719 - RNA, 19 nt, Artificial Sequence
  Synthetic
gaucagaaggaguugaaga

SEQ ID NO: 19720 - RNA, 19 nt, Artificial Sequence
  Synthetic
ggacaacaucccaacauua

SEQ ID NO: 19721 - RNA, 19 nt, Artificial Sequence
  Synthetic
agugaagaucauugacaaa

SEQ ID NO: 19722 - RNA, 19 nt, Artificial Sequence
  Synthetic
augaauugaaggaggauau

SEQ ID NO: 19723 - RNA, 19 nt, Artificial Sequence
  Synthetic
caaacuggaugaagaugaa

SEQ ID NO: 19724 - RNA, 19 nt, Artificial Sequence
  Synthetic
aggcaaugauaguaagaaa

SEQ ID NO: 19725 - RNA, 19 nt, Artificial Sequence
  Synthetic
cauggaacauugugagaaa

SEQ ID NO: 19726 - RNA, 19 nt, Artificial Sequence
  Synthetic
ggacauggcaggaguguuu

SEQ ID NO: 19727 - RNA, 19 nt, Artificial Sequence
  Synthetic
cuugaaagugugaaagaaa

SEQ ID NO: 19728 - RNA, 19 nt, Artificial Sequence
  Synthetic
ccugaaaucuugaugagaa

SEQ ID NO: 19729 - RNA, 19 nt, Artificial Sequence
  Synthetic
aguuagaaagagagggaau

SEQ ID NO: 19730 - RNA, 19 nt, Artificial Sequence
  Synthetic
gaagaaagccagacaacuu

SEQ ID NO: 19731 - RNA, 19 nt, Artificial Sequence
  Synthetic
cggagaauaucaugcuuaa

SEQ ID NO: 19732 - RNA, 19 nt, Artificial Sequence
  Synthetic
ggaauauucuggaggaagu

SEQ ID NO: 19733 - RNA, 19 nt, Artificial Sequence
  Synthetic
aggagcaaauacugggaaa

SEQ ID NO: 19734 - RNA, 19 nt, Artificial Sequence
  Synthetic
guggaauacccaauggaaa

SEQ ID NO: 19735 - RNA, 19 nt, Artificial Sequence
  Synthetic
gcagaaaucuccauggcuu

SEQ ID NO: 19736 - RNA, 19 nt, Artificial Sequence
  Synthetic
gcauagagcagauggaugu

SEQ ID NO: 19737 - RNA, 19 nt, Artificial Sequence
  Synthetic
agggaauauuuauggaaga

SEQ ID NO: 19738 - RNA, 19 nt, Artificial Sequence
  Synthetic
cugaagaggauguaaguca

SEQ ID NO: 19739 - RNA, 19 nt, Artificial Sequence
  Synthetic
aauggaaacaaguggcaua

SEQ ID NO: 19740 - RNA, 19 nt, Artificial Sequence
  Synthetic
acuaacagacuuuggacua

SEQ ID NO: 19741 - RNA, 19 nt, Artificial Sequence
  Synthetic
agaaagagagggaauauuu

SEQ ID NO: 19742 - RNA, 19 nt, Artificial Sequence
  Synthetic
ccucaaauguaaacucaau

SEQ ID NO: 19743 - RNA, 19 nt, Artificial Sequence
  Synthetic
gcaguuagaaagagaggga

SEQ ID NO: 19744 - RNA, 19 nt, Artificial Sequence
  Synthetic
guuagaaagagagggaaua

SEQ ID NO: 19745 - RNA, 19 nt, Artificial Sequence
  Synthetic
gaaagagagggaauauuua

SEQ ID NO: 19746 - RNA, 19 nt, Artificial Sequence
  Synthetic
gaugagaaguggccacaau

SEQ ID NO: 19747 - RNA, 19 nt, Artificial Sequence
  Synthetic
ggccagagcaccugcguau

SEQ ID NO: 19748 - RNA, 19 nt, Artificial Sequence
  Synthetic
gcaaacaaccugaaucuuu

SEQ ID NO: 19749 - RNA, 19 nt, Artificial Sequence
  Synthetic
ccgaucaccucgaagauuu

SEQ ID NO: 19750 - RNA, 19 nt, Artificial Sequence
  Synthetic
gcaaauacugggaaaauau

SEQ ID NO: 19751 - RNA, 19 nt, Artificial Sequence
  Synthetic
gugaacagagggccagaaa

SEQ ID NO: 19752 - RNA, 19 nt, Artificial Sequence
  Synthetic
accugaagccggagaauau

SEQ ID NO: 19753 - RNA, 19 nt, Artificial Sequence
  Synthetic
ggcaaugauaguaagaaau

SEQ ID NO: 19754 - RNA, 19 nt, Artificial Sequence
  Synthetic
ggaagaaaaccauggauaa

SEQ ID NO: 19755 - RNA, 19 nt, Artificial Sequence
  Synthetic
gcagagaaccggaagaaaa

SEQ ID NO: 19756 - RNA, 19 nt, Artificial Sequence
  Synthetic
gccuagagccugugggaca

SEQ ID NO: 19757 - RNA, 19 nt, Artificial Sequence
  Synthetic
gcggaacauucuagaguca

SEQ ID NO: 19758 - RNA, 19 nt, Artificial Sequence
  Synthetic
cggaagaaaaccauggaua

SEQ ID NO: 19759 - RNA, 19 nt, Artificial Sequence
  Synthetic
cagaggaggacgugagcca

SEQ ID NO: 19760 - RNA, 19 nt, Artificial Sequence
  Synthetic
guacauggccccugagauu

SEQ ID NO: 19761 - RNA, 19 nt, Artificial Sequence
  Synthetic
aggccaaaauugugcgcaa

SEQ ID NO: 19762 - RNA, 19 nt, Artificial Sequence
  Synthetic
acacacgggcugagcggaa

SEQ ID NO: 19763 - RNA, 19 nt, Artificial Sequence
  Synthetic
ggugugagugcguaugaaa

SEQ ID NO: 19764 - RNA, 19 nt, Artificial Sequence
  Synthetic
ccgcagagaaccggaagaa

SEQ ID NO: 19765 - RNA, 19 nt, Artificial Sequence
  Synthetic
agguguuccaggugcgaaa

SEQ ID NO: 19766 - RNA, 19 nt, Artificial Sequence
  Synthetic
ggaacauucuagagucagu

SEQ ID NO: 19767 - RNA, 19 nt, Artificial Sequence
  Synthetic
gcuuugagcugcugcgugu

SEQ ID NO: 19768 - RNA, 19 nt, Artificial Sequence
  Synthetic
ucacgcaucuggagcgaga

SEQ ID NO: 19769 - RNA, 19 nt, Artificial Sequence
  Synthetic
gcaaggagucuauccauga

SEQ ID NO: 19770 - RNA, 19 nt, Artificial Sequence
  Synthetic
accucaagcccgagaacau

SEQ ID NO: 19771 - RNA, 19 nt, Artificial Sequence
  Synthetic
caucaaacugaccgacuuu

SEQ ID NO: 19772 - RNA, 19 nt, Artificial Sequence
  Synthetic
gcgcaaugccaaggacaca

SEQ ID NO: 19773 - RNA, 19 nt, Artificial Sequence
  Synthetic
guugagggcagcuggccua

SEQ ID NO: 19774 - RNA, 19 nt, Artificial Sequence
  Synthetic
ccguguuugauuuggauuu

SEQ ID NO: 19775 - RNA, 19 nt, Artificial Sequence
  Synthetic
gacgugagccaguuugaua

SEQ ID NO: 19776 - RNA, 19 nt, Artificial Sequence
  Synthetic
acaucaaacugaccgacuu

SEQ ID NO: 19777 - RNA, 19 nt, Artificial Sequence
  Synthetic
guggcaaacucuaccucau

SEQ ID NO: 19778 - RNA, 19 nt, Artificial Sequence
  Synthetic
gcuucuaccuggcugagau

SEQ ID NO: 19779 - RNA, 19 nt, Artificial Sequence
  Synthetic
gagguggagcugacugaga

SEQ ID NO: 19780 - RNA, 19 nt, Artificial Sequence
  Synthetic
cagccagggccacaucaaa

SEQ ID NO: 19781 - RNA, 19 nt, Artificial Sequence
  Synthetic
gagcggaacauucuagagu

SEQ ID NO: 19782 - RNA, 19 nt, Artificial Sequence
  Synthetic
agaaaaccauggauaagau

SEQ ID NO: 19783 - RNA, 19 nt, Artificial Sequence
  Synthetic
ccucagggaccaagaaguc

SEQ ID NO: 19784 - RNA, 19 nt, Artificial Sequence
  Synthetic
ggagaaagcaggagaauua

SEQ ID NO: 19785 - RNA, 19 nt, Artificial Sequence
  Synthetic
ggagaaaggcauagaggaa

SEQ ID NO: 19786 - RNA, 19 nt, Artificial Sequence
  Synthetic
aaacagaaguccugaagaa

SEQ ID NO: 19787 - RNA, 19 nt, Artificial Sequence
  Synthetic
caugaagacugaagggaau

SEQ ID NO: 19788 - RNA, 19 nt, Artificial Sequence
  Synthetic
ugaaagugguuuagugcua

SEQ ID NO: 19789 - RNA, 19 nt, Artificial Sequence
  Synthetic
gcauagaggaacugaguga

SEQ ID NO: 19790 - RNA, 19 nt, Artificial Sequence
  Synthetic
ggacuugacuuuggagaaa

SEQ ID NO: 19791 - RNA, 19 nt, Artificial Sequence
  Synthetic
uggaagagauacagugauu

SEQ ID NO: 19792 - RNA, 19 nt, Artificial Sequence
  Synthetic
ccuacuaaguuuacacaaa

SEQ ID NO: 19793 - RNA, 19 nt, Artificial Sequence
  Synthetic
gggcagaacugaugagaug

SEQ ID NO: 19794 - RNA, 19 nt, Artificial Sequence
  Synthetic
gagcaaaacagaagaagaa

SEQ ID NO: 19795 - RNA, 19 nt, Artificial Sequence
  Synthetic
acacaaagaacuauggcaa

SEQ ID NO: 19796 - RNA, 19 nt, Artificial Sequence
  Synthetic
aaagcaagguagaguuuaa

SEQ ID NO: 19797 - RNA, 19 nt, Artificial Sequence
  Synthetic
aggaagaagaagacgacua

SEQ ID NO: 19798 - RNA, 19 nt, Artificial Sequence
  Synthetic
agagaaggguucauauaaa

SEQ ID NO: 19799 - RNA, 19 nt, Artificial Sequence
  Synthetic
gaaacuacacaaagaacua

SEQ ID NO: 19800 - RNA, 19 nt, Artificial Sequence
  Synthetic
guaaacagcuugaagacuu

SEQ ID NO: 19801 - RNA, 19 nt, Artificial Sequence
  Synthetic
ggaaugguguugauacaaa

SEQ ID NO: 19802 - RNA, 19 nt, Artificial Sequence
  Synthetic
ggaaauggcuaaaagagaa

SEQ ID NO: 19803 - RNA, 19 nt, Artificial Sequence
  Synthetic
cauaguaguucaggagaua

SEQ ID NO: 19804 - RNA, 19 nt, Artificial Sequence
  Synthetic
aggauagacaguaaggaua

SEQ ID NO: 19805 - RNA, 19 nt, Artificial Sequence
  Synthetic
ugauuuggcuaaagaggaa

SEQ ID NO: 19806 - RNA, 19 nt, Artificial Sequence
  Synthetic
guuuagugcuagaaggaga

SEQ ID NO: 19807 - RNA, 19 nt, Artificial Sequence
  Synthetic
ggacuaagaaaucaugaua

SEQ ID NO: 19808 - RNA, 19 nt, Artificial Sequence
  Synthetic
cagaagaaguauugcuguu

SEQ ID NO: 19809 - RNA, 19 nt, Artificial Sequence
  Synthetic
ccaggaagaugauggccaa

SEQ ID NO: 19810 - RNA, 19 nt, Artificial Sequence
  Synthetic
acaaagaacuauggcaaau

SEQ ID NO: 19811 - RNA, 19 nt, Artificial Sequence
  Synthetic
cagcgaugccauagagaga

SEQ ID NO: 19812 - RNA, 19 nt, Artificial Sequence
  Synthetic
ggagauaauuguauggaag

SEQ ID NO: 19813 - RNA, 19 nt, Artificial Sequence
  Synthetic
ucaagaaguuccucugaua

SEQ ID NO: 19814 - RNA, 19 nt, Artificial Sequence
  Synthetic
acagagaagacaagugaaa

SEQ ID NO: 19815 - RNA, 19 nt, Artificial Sequence
  Synthetic
ggaugaaggcucagcucaa

SEQ ID NO: 19816 - RNA, 19 nt, Artificial Sequence
  Synthetic
gaauuugauuggaaaggaa

SEQ ID NO: 19817 - RNA, 19 nt, Artificial Sequence
  Synthetic
gaacugaauuugauuggaa

SEQ ID NO: 19818 - RNA, 19 nt, Artificial Sequence
  Synthetic
ugacgaagcugcucaggua

SEQ ID NO: 19819 - RNA, 19 nt, Artificial Sequence
  Synthetic
gaaauuuccacuagaguuu

SEQ ID NO: 19820 - RNA, 19 nt, Artificial Sequence
  Synthetic
ccacaaaacgcauggaaca

SEQ ID NO: 19821 - RNA, 19 nt, Artificial Sequence
  Synthetic
gagggaggcugaaggugaa

SEQ ID NO: 19822 - RNA, 19 nt, Artificial Sequence
  Synthetic
ugagagaggagcaggugaa

SEQ ID NO: 19823 - RNA, 19 nt, Artificial Sequence
  Synthetic
gagaggagcaggugaagca

SEQ ID NO: 19824 - RNA, 19 nt, Artificial Sequence
  Synthetic
gggcagaggagaucuucaa

SEQ ID NO: 19825 - RNA, 19 nt, Artificial Sequence
  Synthetic
gugguuaccucaaagacaa

SEQ ID NO: 19826 - RNA, 19 nt, Artificial Sequence
  Synthetic
gagaagguggugucagcaa

SEQ ID NO: 19827 - RNA, 19 nt, Artificial Sequence
  Synthetic
gcugugaagcugaaaauua

SEQ ID NO: 19828 - RNA, 19 nt, Artificial Sequence
  Synthetic
agaagguggugucagcaaa

SEQ ID NO: 19829 - RNA, 19 nt, Artificial Sequence
  Synthetic
ccaccuggagugugagaga

SEQ ID NO: 19830 - RNA, 19 nt, Artificial Sequence
  Synthetic
agagggaggcugaagguga

SEQ ID NO: 19831 - RNA, 19 nt, Artificial Sequence
  Synthetic
aggagaggaugaaggcuca

SEQ ID NO: 19832 - RNA, 19 nt, Artificial Sequence
  Synthetic
acguguaccuggagcagau

SEQ ID NO: 19833 - RNA, 19 nt, Artificial Sequence
  Synthetic
agacagagaagacaaguga

SEQ ID NO: 19834 - RNA, 19 nt, Artificial Sequence
  Synthetic
cagaaauguuugcugaacu

SEQ ID NO: 19835 - RNA, 19 nt, Artificial Sequence
  Synthetic
augaacugcugacgggaau

SEQ ID NO: 19836 - RNA, 19 nt, Artificial Sequence
  Synthetic
ggaccgaccugggaaauuu

SEQ ID NO: 19837 - RNA, 19 nt, Artificial Sequence
  Synthetic
gcgcgauguuagugaggac

SEQ ID NO: 19838 - RNA, 19 nt, Artificial Sequence
  Synthetic
ucagguacuuugugagcga

SEQ ID NO: 19839 - RNA, 19 nt, Artificial Sequence
  Synthetic
guaccagaugcuccagaaa

SEQ ID NO: 19840 - RNA, 19 nt, Artificial Sequence
  Synthetic
agacaauugccuccaguuu

SEQ ID NO: 19841 - RNA, 19 nt, Artificial Sequence
  Synthetic
cggcagagaugcugguagc

SEQ ID NO: 19842 - RNA, 19 nt, Artificial Sequence
  Synthetic
cgugcugcuccguggcaua

SEQ ID NO: 19843 - RNA, 19 nt, Artificial Sequence
  Synthetic
cuucaggaauccaggccca

SEQ ID NO: 19844 - RNA, 19 nt, Artificial Sequence
  Synthetic
ggugaaggauauagcaaua

SEQ ID NO: 19845 - RNA, 19 nt, Artificial Sequence
  Synthetic
gcaaguuaguagaggccaa

SEQ ID NO: 19846 - RNA, 19 nt, Artificial Sequence
  Synthetic
agaucaagcuucugaaauu

SEQ ID NO: 19847 - RNA, 19 nt, Artificial Sequence
  Synthetic
aguccaagguugaauauaa

SEQ ID NO: 19848 - RNA, 19 nt, Artificial Sequence
  Synthetic
guguauagaagaaggagaa

SEQ ID NO: 19849 - RNA, 19 nt, Artificial Sequence
  Synthetic
caacuguccugaugaauua

SEQ ID NO: 19850 - RNA, 19 nt, Artificial Sequence
  Synthetic
gaaagaugguuaccgaaua

SEQ ID NO: 19851 - RNA, 19 nt, Artificial Sequence
  Synthetic
ggaaaugguuugucuucaa

SEQ ID NO: 19852 - RNA, 19 nt, Artificial Sequence
  Synthetic
caaaguagauucugaaguu

SEQ ID NO: 19853 - RNA, 19 nt, Artificial Sequence
  Synthetic
acacauggcuauucagauu

SEQ ID NO: 19854 - RNA, 19 nt, Artificial Sequence
  Synthetic
ccaauaauccacaggcaau

SEQ ID NO: 19855 - RNA, 19 nt, Artificial Sequence
  Synthetic
aaggcaaggugaaggauau

SEQ ID NO: 19856 - RNA, 19 nt, Artificial Sequence
  Synthetic
gguuuguugugcaguaaua

SEQ ID NO: 19857 - RNA, 19 nt, Artificial Sequence
  Synthetic
agacaaauuuccugcacuu

SEQ ID NO: 19858 - RNA, 19 nt, Artificial Sequence
  Synthetic
guuaguacccagugagaca

SEQ ID NO: 19859 - RNA, 19 nt, Artificial Sequence
  Synthetic
agacacagauauuuggaau

SEQ ID NO: 19860 - RNA, 19 nt, Artificial Sequence
  Synthetic
gggcagaucuguaguaaac

SEQ ID NO: 19861 - RNA, 19 nt, Artificial Sequence
  Synthetic
ggauagagaagaacgacuu

SEQ ID NO: 19862 - RNA, 19 nt, Artificial Sequence
  Synthetic
gggaagucauccacaaaga

SEQ ID NO: 19863 - RNA, 19 nt, Artificial Sequence
  Synthetic
gagaagaacgacuugagaa

SEQ ID NO: 19864 - RNA, 19 nt, Artificial Sequence
  Synthetic
aggaaaaugugcuacaaaa

SEQ ID NO: 19865 - RNA, 19 nt, Artificial Sequence
  Synthetic
gcguauuuuccaugggauu

SEQ ID NO: 19866 - RNA, 19 nt, Artificial Sequence
  Synthetic
uggacaauguuuuggcaau

SEQ ID NO: 19867 - RNA, 19 nt, Artificial Sequence
  Synthetic
gcacauuugucuuccagaa

SEQ ID NO: 19868 - RNA, 19 nt, Artificial Sequence
  Synthetic
aguuaagaucacagacaau

SEQ ID NO: 19869 - RNA, 19 nt, Artificial Sequence
  Synthetic
gcagaucuguaguaaacaa

SEQ ID NO: 19870 - RNA, 19 nt, Artificial Sequence
  Synthetic
ccauggugauauugccuua

SEQ ID NO: 19871 - RNA, 19 nt, Artificial Sequence
  Synthetic
ggagaaaagcccaugguga

SEQ ID NO: 19872 - RNA, 19 nt, Artificial Sequence
  Synthetic
ucauguguguauagaagaa

SEQ ID NO: 19873 - RNA, 19 nt, Artificial Sequence
  Synthetic
ccuuagaaaugcuuuagaa

SEQ ID NO: 19874 - RNA, 19 nt, Artificial Sequence
  Synthetic
gcgaagagauuccaagaaa

SEQ ID NO: 19875 - RNA, 19 nt, Artificial Sequence
  Synthetic
ggaagaugcugaagaguuu

SEQ ID NO: 19876 - RNA, 19 nt, Artificial Sequence
  Synthetic
acaaagaaggugagagaga

SEQ ID NO: 19877 - RNA, 19 nt, Artificial Sequence
  Synthetic
caucaaaccuguuacuaaa

SEQ ID NO: 19878 - RNA, 19 nt, Artificial Sequence
  Synthetic
ggagaaagaagaagaagau

SEQ ID NO: 19879 - RNA, 19 nt, Artificial Sequence
  Synthetic
aaggauacuuggagaagaa

SEQ ID NO: 19880 - RNA, 19 nt, Artificial Sequence
  Synthetic
gaacugaccucccaggaua

SEQ ID NO: 19881 - RNA, 19 nt, Artificial Sequence
  Synthetic
gaagagauuccaagaaaga

SEQ ID NO: 19882 - RNA, 19 nt, Artificial Sequence
  Synthetic
cuacagaggagaaagaaga

SEQ ID NO: 19883 - RNA, 19 nt, Artificial Sequence
  Synthetic
aggagaaagaagaagaaga

SEQ ID NO: 19884 - RNA, 19 nt, Artificial Sequence
  Synthetic
ggacagcucugaugauaau

SEQ ID NO: 19885 - RNA, 19 nt, Artificial Sequence
  Synthetic
ggaugaggaggaagaagaa

SEQ ID NO: 19886 - RNA, 19 nt, Artificial Sequence
  Synthetic
gaguagacuaugccaguua

SEQ ID NO: 19887 - RNA, 19 nt, Artificial Sequence
  Synthetic
gaauggaagacaucguaaa

SEQ ID NO: 19888 - RNA, 19 nt, Artificial Sequence
  Synthetic
uggcagaagguuugcggaa

SEQ ID NO: 19889 - RNA, 19 nt, Artificial Sequence
  Synthetic
agaugaaacccaggaaaua

SEQ ID NO: 19890 - RNA, 19 nt, Artificial Sequence
  Synthetic
gagacuggguggaucaaau

SEQ ID NO: 19891 - RNA, 19 nt, Artificial Sequence
  Synthetic
augaagaggaugaggagga

SEQ ID NO: 19892 - RNA, 19 nt, Artificial Sequence
  Synthetic
aggaugaggaggaagaaga

SEQ ID NO: 19893 - RNA, 19 nt, Artificial Sequence
  Synthetic
acgaaaaggaguagacuau

SEQ ID NO: 19894 - RNA, 19 nt, Artificial Sequence
  Synthetic
aagaagagacauaugauga

SEQ ID NO: 19895 - RNA, 19 nt, Artificial Sequence
  Synthetic
cagaggagaaagaagaaga

SEQ ID NO: 19896 - RNA, 19 nt, Artificial Sequence
  Synthetic
gaacagccucguugggauu

SEQ ID NO: 19897 - RNA, 19 nt, Artificial Sequence
  Synthetic
ggauuguuccaaaggagua

SEQ ID NO: 19898 - RNA, 19 nt, Artificial Sequence
  Synthetic
cguaaaaggagcucaagaa

SEQ ID NO: 19899 - RNA, 19 nt, Artificial Sequence
  Synthetic
acguaaucaagcaaggaua

SEQ ID NO: 19900 - RNA, 19 nt, Artificial Sequence
  Synthetic
aagaggaugaggaggaaga

SEQ ID NO: 19901 - RNA, 19 nt, Artificial Sequence
  Synthetic
gaagaaaagcaaagaucau

SEQ ID NO: 19902 - RNA, 19 nt, Artificial Sequence
  Synthetic
caaagaaggugagagagaa

SEQ ID NO: 19903 - RNA, 19 nt, Artificial Sequence
  Synthetic
ggacauuacugguuguucu

SEQ ID NO: 19904 - RNA, 19 nt, Artificial Sequence
  Synthetic
ggacagugcuccagugaaa

SEQ ID NO: 19905 - RNA, 19 nt, Artificial Sequence
  Synthetic
aagaaaggauggaaagaaa

SEQ ID NO: 19906 - RNA, 19 nt, Artificial Sequence
  Synthetic
agacaaaggugaugcagaa

SEQ ID NO: 19907 - RNA, 19 nt, Artificial Sequence
  Synthetic
uggaagugauaaagacaaa

SEQ ID NO: 19908 - RNA, 19 nt, Artificial Sequence
  Synthetic
ccaagaaagcaaaggaaaa

SEQ ID NO: 19909 - RNA, 19 nt, Artificial Sequence
  Synthetic
gcaaggaauacaauagaua

SEQ ID NO: 19910 - RNA, 19 nt, Artificial Sequence
  Synthetic
ccucagaacgauaugauaa

SEQ ID NO: 19911 - RNA, 19 nt, Artificial Sequence
  Synthetic
cagugaaaguggaagaaca

SEQ ID NO: 19912 - RNA, 19 nt, Artificial Sequence
  Synthetic
ugaugagagaggagaauua

SEQ ID NO: 19913 - RNA, 19 nt, Artificial Sequence
  Synthetic
caugaaagcacgagugaca

SEQ ID NO: 19914 - RNA, 19 nt, Artificial Sequence
  Synthetic
gcaaaggaaaagagagaau

SEQ ID NO: 19915 - RNA, 19 nt, Artificial Sequence
  Synthetic
agugaaaguggaagaacaa

SEQ ID NO: 19916 - RNA, 19 nt, Artificial Sequence
  Synthetic
gaaaggugaauuugcaaua

SEQ ID NO: 19917 - RNA, 19 nt, Artificial Sequence
  Synthetic
ucccaaagaugcugaagaa

SEQ ID NO: 19918 - RNA, 19 nt, Artificial Sequence
  Synthetic
gaggagaauuauaugauga

SEQ ID NO: 19919 - RNA, 19 nt, Artificial Sequence
  Synthetic
ggauuguacuggagcuuuu

SEQ ID NO: 19920 - RNA, 19 nt, Artificial Sequence
  Synthetic
ugaagaaugugguugcuaa

SEQ ID NO: 19921 - RNA, 19 nt, Artificial Sequence
  Synthetic
cuaucuaucuucaggaauu

SEQ ID NO: 19922 - RNA, 19 nt, Artificial Sequence
  Synthetic
gcugaaauuuguauugcaa

SEQ ID NO: 19923 - RNA, 19 nt, Artificial Sequence
  Synthetic
ucaggaauuucaagacaaa

SEQ ID NO: 19924 - RNA, 19 nt, Artificial Sequence
  Synthetic
aggaagaugagucaggaua

SEQ ID NO: 19925 - RNA, 19 nt, Artificial Sequence
  Synthetic
cagauauacugaaaggaga

SEQ ID NO: 19926 - RNA, 19 nt, Artificial Sequence
  Synthetic
agauauacugaaaggagaa

SEQ ID NO: 19927 - RNA, 19 nt, Artificial Sequence
  Synthetic
aguuauaccuguugcuauu

SEQ ID NO: 19928 - RNA, 19 nt, Artificial Sequence
  Synthetic
gguagaugcugaagaaugu

SEQ ID NO: 19929 - RNA, 19 nt, Artificial Sequence
  Synthetic
gaagaaugugguugcuaaa

SEQ ID NO: 19930 - RNA, 19 nt, Artificial Sequence
  Synthetic
aagcaaaggaaaagagaga

SEQ ID NO: 19931 - RNA, 19 nt, Artificial Sequence
  Synthetic
ccaauaagcaauccacuaa

SEQ ID NO: 19932 - RNA, 19 nt, Artificial Sequence
  Synthetic
gaaaggauggaaagaaaga

SEQ ID NO: 19933 - RNA, 19 nt, Artificial Sequence
  Synthetic
cagaagauggggaagaaua

SEQ ID NO: 19934 - RNA, 19 nt, Artificial Sequence
  Synthetic
cacuguagauccugagaaa

SEQ ID NO: 19935 - RNA, 19 nt, Artificial Sequence
  Synthetic
uggaggagauucagaucaa

SEQ ID NO: 19936 - RNA, 19 nt, Artificial Sequence
  Synthetic
acgcauucccugaggauuu

SEQ ID NO: 19937 - RNA, 19 nt, Artificial Sequence
  Synthetic
uggaggaaguggagaagga

SEQ ID NO: 19938 - RNA, 19 nt, Artificial Sequence
  Synthetic
cugagaaauccgugcgaga

SEQ ID NO: 19939 - RNA, 19 nt, Artificial Sequence
  Synthetic
agacgcaggaggaggacaa

SEQ ID NO: 19940 - RNA, 19 nt, Artificial Sequence
  Synthetic
cgacccagcuggaggaagu

SEQ ID NO: 19941 - RNA, 19 nt, Artificial Sequence
  Synthetic
ucaaagagccagccgagaa

SEQ ID NO: 19942 - RNA, 19 nt, Artificial Sequence
  Synthetic
gcaagagccuggacgcauu

SEQ ID NO: 19943 - RNA, 19 nt, Artificial Sequence
  Synthetic
ucgauggacuggagacaga

SEQ ID NO: 19944 - RNA, 19 nt, Artificial Sequence
  Synthetic
ccgagaggaagguggccaa

SEQ ID NO: 19945 - RNA, 19 nt, Artificial Sequence
  Synthetic
ggaauauaccucaaggcga

SEQ ID NO: 19946 - RNA, 19 nt, Artificial Sequence
  Synthetic
guacauggcuuccuggaca

SEQ ID NO: 19947 - RNA, 19 nt, Artificial Sequence
  Synthetic
cuguagauccugagaaauc

SEQ ID NO: 19948 - RNA, 19 nt, Artificial Sequence
  Synthetic
gagcaaccgcuuuguagaa

SEQ ID NO: 19949 - RNA, 19 nt, Artificial Sequence
  Synthetic
ggcuacaggccaaggauga

SEQ ID NO: 19950 - RNA, 19 nt, Artificial Sequence
  Synthetic
acagaugggacgacgaaga

SEQ ID NO: 19951 - RNA, 19 nt, Artificial Sequence
  Synthetic
gaguaucagcagaagauca

SEQ ID NO: 19952 - RNA, 19 nt, Artificial Sequence
  Synthetic
gagccagccgagaagcaaa

SEQ ID NO: 19953 - RNA, 19 nt, Artificial Sequence
  Synthetic
aggaaguggagaaggaugu

SEQ ID NO: 19954 - RNA, 19 nt, Artificial Sequence
  Synthetic
gaauauaccucaaggcgag

SEQ ID NO: 19955 - RNA, 19 nt, Artificial Sequence
  Synthetic
gcaagaagggccacaggca

SEQ ID NO: 19956 - RNA, 19 nt, Artificial Sequence
  Synthetic
ccacagauguauuuauugu

SEQ ID NO: 19957 - RNA, 19 nt, Artificial Sequence
  Synthetic
ugaaggagcuggagaucuc

SEQ ID NO: 19958 - RNA, 19 nt, Artificial Sequence
  Synthetic
guggcagaguggucagaga

SEQ ID NO: 19959 - RNA, 19 nt, Artificial Sequence
  Synthetic
gagaaguggucagcagaca

SEQ ID NO: 19960 - RNA, 19 nt, Artificial Sequence
  Synthetic
aggaguaucagcagaagau

SEQ ID NO: 19961 - RNA, 19 nt, Artificial Sequence
  Synthetic
caaagcugaacgaggccaa

SEQ ID NO: 19962 - RNA, 19 nt, Artificial Sequence
  Synthetic
cgacuggagcagcugggaa

SEQ ID NO: 19963 - RNA, 19 nt, Artificial Sequence
  Synthetic
agcuggaggaaguggagaa

SEQ ID NO: 19964 - RNA, 19 nt, Artificial Sequence
  Synthetic
agaaagaggagaagcauau

SEQ ID NO: 19965 - RNA, 19 nt, Artificial Sequence
  Synthetic
gaagaaagcaauccugaaa

SEQ ID NO: 19966 - RNA, 19 nt, Artificial Sequence
  Synthetic
cugcagaaggacaggacaa

SEQ ID NO: 19967 - RNA, 19 nt, Artificial Sequence
  Synthetic
ucuugaaagugaucggaaa

SEQ ID NO: 19968 - RNA, 19 nt, Artificial Sequence
  Synthetic
gcacaucucuggaagcuua

SEQ ID NO: 19969 - RNA, 19 nt, Artificial Sequence
  Synthetic
cagcugaaauguacgacaa

SEQ ID NO: 19970 - RNA, 19 nt, Artificial Sequence
  Synthetic
cauuaaugguggagaguug

SEQ ID NO: 19971 - RNA, 19 nt, Artificial Sequence
  Synthetic
aagaaagaggagaagcaua

SEQ ID NO: 19972 - RNA, 19 nt, Artificial Sequence
  Synthetic
aggagaacauugaacacaa

SEQ ID NO: 19973 - RNA, 19 nt, Artificial Sequence
  Synthetic
acgacaacauucugaacaa

SEQ ID NO: 19974 - RNA, 19 nt, Artificial Sequence
  Synthetic
caucguuuauagagacuua

SEQ ID NO: 19975 - RNA, 19 nt, Artificial Sequence
  Synthetic
ucauggagauuaagaguca

SEQ ID NO: 19976 - RNA, 19 nt, Artificial Sequence
  Synthetic
ggaaagggcaguuuuggaa

SEQ ID NO: 19977 - RNA, 19 nt, Artificial Sequence
  Synthetic
agucaaaguuuuacagaag

SEQ ID NO: 19978 - RNA, 19 nt, Artificial Sequence
  Synthetic
cagucaaaguuuuacagaa

SEQ ID NO: 19979 - RNA, 19 nt, Artificial Sequence
  Synthetic
guccaauccucaugcuaaa

SEQ ID NO: 19980 - RNA, 19 nt, Artificial Sequence
  Synthetic
cagcugaaaccaaauauua

SEQ ID NO: 19981 - RNA, 19 nt, Artificial Sequence
  Synthetic
cagagaauauuuugcuaga

SEQ ID NO: 19982 - RNA, 19 nt, Artificial Sequence
  Synthetic
agucagagccguugguguu

SEQ ID NO: 19983 - RNA, 19 nt, Artificial Sequence
  Synthetic
gggcugugaugacgaauau

SEQ ID NO: 19984 - RNA, 19 nt, Artificial Sequence
  Synthetic
gccaauaacuccuaugcau

SEQ ID NO: 19985 - RNA, 19 nt, Artificial Sequence
  Synthetic
agacuuaaaaccagagaau

SEQ ID NO: 19986 - RNA, 19 nt, Artificial Sequence
  Synthetic
uagcaagacacaaggcaga

SEQ ID NO: 19987 - RNA, 19 nt, Artificial Sequence
  Synthetic
uuuccagacugcugacaaa

SEQ ID NO: 19988 - RNA, 19 nt, Artificial Sequence
  Synthetic
gcguuagagugccgccuua

SEQ ID NO: 19989 - RNA, 19 nt, Artificial Sequence
  Synthetic
cguccaauccucaugcuaa

SEQ ID NO: 19990 - RNA, 19 nt, Artificial Sequence
  Synthetic
gaacacaacagcacaacau

SEQ ID NO: 19991 - RNA, 19 nt, Artificial Sequence
  Synthetic
ggaaagguucuucuagcaa

SEQ ID NO: 19992 - RNA, 19 nt, Artificial Sequence
  Synthetic
gcaaggagaacauugaaca

SEQ ID NO: 19993 - RNA, 19 nt, Artificial Sequence
  Synthetic
cggaauguucuguugaaga

SEQ ID NO: 19994 - RNA, 19 nt, Artificial Sequence
  Synthetic
ccucaaagucaucggcaaa

SEQ ID NO: 19995 - RNA, 19 nt, Artificial Sequence
  Synthetic
cagacuuucuugagauuaa

SEQ ID NO: 19996 - RNA, 19 nt, Artificial Sequence
  Synthetic
aagagaaggaccugugaaa

SEQ ID NO: 19997 - RNA, 19 nt, Artificial Sequence
  Synthetic
gcaaagggaacuacgggaa

SEQ ID NO: 19998 - RNA, 19 nt, Artificial Sequence
  Synthetic
caggacaggucaucagaua

SEQ ID NO: 19999 - RNA, 19 nt, Artificial Sequence
  Synthetic
gggaugaccuguaccacaa

SEQ ID NO: 20000 - RNA, 19 nt, Artificial Sequence
  Synthetic
agugaagguacuacagaaa

SEQ ID NO: 20001 - RNA, 19 nt, Artificial Sequence
  Synthetic
gcucauaggguaucaauau

SEQ ID NO: 20002 - RNA, 19 nt, Artificial Sequence
  Synthetic
gagaaggaccugugaaacu

SEQ ID NO: 20003 - RNA, 19 nt, Artificial Sequence
  Synthetic
uaacaagcucauaggguau

SEQ ID NO: 20004 - RNA, 19 nt, Artificial Sequence
  Synthetic
guaaaaugacagagaugua

SEQ ID NO: 20005 - RNA, 19 nt, Artificial Sequence
  Synthetic
ggaagguccuacuggccaa

SEQ ID NO: 20006 - RNA, 19 nt, Artificial Sequence
  Synthetic
cagugaagguacuacagaa

SEQ ID NO: 20007 - RNA, 19 nt, Artificial Sequence
  Synthetic
caaggaagguguagagccu

SEQ ID NO: 20008 - RNA, 19 nt, Artificial Sequence
  Synthetic
ucaacgagaagcagguuua

SEQ ID NO: 20009 - RNA, 19 nt, Artificial Sequence
  Synthetic
gggcaguccucuacgagau

SEQ ID NO: 20010 - RNA, 19 nt, Artificial Sequence
  Synthetic
gaugguuacuggagcucua

SEQ ID NO: 20011 - RNA, 19 nt, Artificial Sequence
  Synthetic
uuggauugcuagaagagaa

SEQ ID NO: 20012 - RNA, 19 nt, Artificial Sequence
  Synthetic
aggaagguguagagccuga

SEQ ID NO: 20013 - RNA, 19 nt, Artificial Sequence
  Synthetic
gaaagagccuuaugaucga

SEQ ID NO: 20014 - RNA, 19 nt, Artificial Sequence
  Synthetic
caaauggcuuccaauguua

SEQ ID NO: 20015 - RNA, 19 nt, Artificial Sequence
  Synthetic
cgccagaggaugaugacau

SEQ ID NO: 20016 - RNA, 19 nt, Artificial Sequence
  Synthetic
ggaagagcgacucaaacua

SEQ ID NO: 20017 - RNA, 19 nt, Artificial Sequence
  Synthetic
gaaggaccaugaagagaga

SEQ ID NO: 20018 - RNA, 19 nt, Artificial Sequence
  Synthetic
ccuccagggccaaugggaa

SEQ ID NO: 20019 - RNA, 19 nt, Artificial Sequence
  Synthetic
acgagaagcagguuuauuu

SEQ ID NO: 20020 - RNA, 19 nt, Artificial Sequence
  Synthetic
gguggcaggugcacaggua

SEQ ID NO: 20021 - RNA, 19 nt, Artificial Sequence
  Synthetic
ggacaggucaucagauacu

SEQ ID NO: 20022 - RNA, 19 nt, Artificial Sequence
  Synthetic
guucugacacuaagacauu

SEQ ID NO: 20023 - RNA, 19 nt, Artificial Sequence
  Synthetic
cuguaccacaagaggcuaa

SEQ ID NO: 20024 - RNA, 19 nt, Artificial Sequence
  Synthetic
ccaaagaucugaaggguaa

SEQ ID NO: 20025 - RNA, 19 nt, Artificial Sequence
  Synthetic
cgaugaacacagagagaaa

SEQ ID NO: 20026 - RNA, 19 nt, Artificial Sequence
  Synthetic
ccauguaugucuugagaaa

SEQ ID NO: 20027 - RNA, 19 nt, Artificial Sequence
  Synthetic
gggaagaagugaaugguuu

SEQ ID NO: 20028 - RNA, 19 nt, Artificial Sequence
  Synthetic
gagaguaacuacagaagaa

SEQ ID NO: 20029 - RNA, 19 nt, Artificial Sequence
  Synthetic
ugucaaaguguuacagaaa

SEQ ID NO: 20030 - RNA, 19 nt, Artificial Sequence
  Synthetic
gggauuaaaugcaaagaga

SEQ ID NO: 20031 - RNA, 19 nt, Artificial Sequence
  Synthetic
ucucagaucacaagaaaua

SEQ ID NO: 20032 - RNA, 19 nt, Artificial Sequence
  Synthetic
acaaagacgagcaggacua

SEQ ID NO: 20033 - RNA, 19 nt, Artificial Sequence
  Synthetic
gagcaggacuaaacgaauu

SEQ ID NO: 20034 - RNA, 19 nt, Artificial Sequence
  Synthetic
agaaaaggcuuaaugguua

SEQ ID NO: 20035 - RNA, 19 nt, Artificial Sequence
  Synthetic
caggagauaugcagaguuu

SEQ ID NO: 20036 - RNA, 19 nt, Artificial Sequence
  Synthetic
aagaagagguuuacuguuu

SEQ ID NO: 20037 - RNA, 19 nt, Artificial Sequence
  Synthetic
uggaaauccucaugccaaa

SEQ ID NO: 20038 - RNA, 19 nt, Artificial Sequence
  Synthetic
uggaagaacuccuagaaaa

SEQ ID NO: 20039 - RNA, 19 nt, Artificial Sequence
  Synthetic
gcagaucauuuaagaagua

SEQ ID NO: 20040 - RNA, 19 nt, Artificial Sequence
  Synthetic
guacaugguuguuuaagaa

SEQ ID NO: 20041 - RNA, 19 nt, Artificial Sequence
  Synthetic
gaaucuuccuuuagaggua

SEQ ID NO: 20042 - RNA, 19 nt, Artificial Sequence
  Synthetic
cagaagaaacaguuccaua

SEQ ID NO: 20043 - RNA, 19 nt, Artificial Sequence
  Synthetic
ggagauaugcagaguuuga

SEQ ID NO: 20044 - RNA, 19 nt, Artificial Sequence
  Synthetic
acacauuggcugcuaguua

SEQ ID NO: 20045 - RNA, 19 nt, Artificial Sequence
  Synthetic
caacuaacuuacaugcuua

SEQ ID NO: 20046 - RNA, 19 nt, Artificial Sequence
  Synthetic
gaaagaaaucacagaagca

SEQ ID NO: 20047 - RNA, 19 nt, Artificial Sequence
  Synthetic
cuuaacagauuuugggcuu

SEQ ID NO: 20048 - RNA, 19 nt, Artificial Sequence
  Synthetic
ugacaauauccuucacaaa

SEQ ID NO: 20049 - RNA, 19 nt, Artificial Sequence
  Synthetic
gcaguuugccauucagaaa

SEQ ID NO: 20050 - RNA, 19 nt, Artificial Sequence
  Synthetic
gggcugaccuuguacaaaa

SEQ ID NO: 20051 - RNA, 19 nt, Artificial Sequence
  Synthetic
aacggaaacuggauggaaa

SEQ ID NO: 20052 - RNA, 19 nt, Artificial Sequence
  Synthetic
caccugaaguaauuagaaa

SEQ ID NO: 20053 - RNA, 19 nt, Artificial Sequence
  Synthetic
gcagauguguauucaguau

SEQ ID NO: 20054 - RNA, 19 nt, Artificial Sequence
  Synthetic
gggaugaggaggaggaaga

SEQ ID NO: 20055 - RNA, 19 nt, Artificial Sequence
  Synthetic
cuauaaagcaguagacaau

SEQ ID NO: 20056 - RNA, 19 nt, Artificial Sequence
  Synthetic
ccaaagacccugugaauca

SEQ ID NO: 20057 - RNA, 19 nt, Artificial Sequence
  Synthetic
guuuaaacuuugugccuuu

SEQ ID NO: 20058 - RNA, 19 nt, Artificial Sequence
  Synthetic
ccucugggcuucaggguau

SEQ ID NO: 20059 - RNA, 19 nt, Artificial Sequence
  Synthetic
gcaaacagaucaucgccaa

SEQ ID NO: 20060 - RNA, 19 nt, Artificial Sequence
  Synthetic
cagcaugggaugaggagga

SEQ ID NO: 20061 - RNA, 19 nt, Artificial Sequence
  Synthetic
ggugacaggcccaguggaa

SEQ ID NO: 20062 - RNA, 19 nt, Artificial Sequence
  Synthetic
cgccuaggccugugaggua

SEQ ID NO: 20063 - RNA, 19 nt, Artificial Sequence
  Synthetic
agacaugaggcuucgggaa

SEQ ID NO: 20064 - RNA, 19 nt, Artificial Sequence
  Synthetic
gaaauuugcuggaaugcca

SEQ ID NO: 20065 - RNA, 19 nt, Artificial Sequence
  Synthetic
uagcauggacucuggguuu

SEQ ID NO: 20066 - RNA, 19 nt, Artificial Sequence
  Synthetic
ggacuaaggaucaccgcuu

SEQ ID NO: 20067 - RNA, 19 nt, Artificial Sequence
  Synthetic
ccaucagucugguguguga

SEQ ID NO: 20068 - RNA, 19 nt, Artificial Sequence
  Synthetic
ugccaaagacccugugaau

SEQ ID NO: 20069 - RNA, 19 nt, Artificial Sequence
  Synthetic
gaccugaggcagaugaaau

SEQ ID NO: 20070 - RNA, 19 nt, Artificial Sequence
  Synthetic
uaugcaacccuuagagauu

SEQ ID NO: 20071 - RNA, 19 nt, Artificial Sequence
  Synthetic
gcgacaaggaggagaaagc

SEQ ID NO: 20072 - RNA, 19 nt, Artificial Sequence
  Synthetic
ccugaaauuugcuggaaug

SEQ ID NO: 20073 - RNA, 19 nt, Artificial Sequence
  Synthetic
ggaggaguaaccugaaauu

SEQ ID NO: 20074 - RNA, 19 nt, Artificial Sequence
  Synthetic
ccucaggaacccacccaaa

SEQ ID NO: 20075 - RNA, 19 nt, Artificial Sequence
  Synthetic
ggaacugcauucuuuuaaa

SEQ ID NO: 20076 - RNA, 19 nt, Artificial Sequence
  Synthetic
acgggagcuuugucaauaa

SEQ ID NO: 20077 - RNA, 19 nt, Artificial Sequence
  Synthetic
caucaguacuauaaugacu

SEQ ID NO: 20078 - RNA, 19 nt, Artificial Sequence
  Synthetic
guacauggguuguguggag

SEQ ID NO: 20079 - RNA, 19 nt, Artificial Sequence
  Synthetic
ucaaacaauaccucaggaa

SEQ ID NO: 20080 - RNA, 19 nt, Artificial Sequence
  Synthetic
ggaagagccaccugaccau

SEQ ID NO: 20081 - RNA, 19 nt, Artificial Sequence
  Synthetic
gggaggaguaaccugaaau

SEQ ID NO: 20082 - RNA, 19 nt, Artificial Sequence
  Synthetic
gggucucacuuauaccaaa

SEQ ID NO: 20083 - RNA, 19 nt, Artificial Sequence
  Synthetic
ccacgggagcuuugucaau

SEQ ID NO: 20084 - RNA, 19 nt, Artificial Sequence
  Synthetic
aagcaaagaugaagggaaa

SEQ ID NO: 20085 - RNA, 19 nt, Artificial Sequence
  Synthetic
cgacggagccuuugggaaa

SEQ ID NO: 20086 - RNA, 19 nt, Artificial Sequence
  Synthetic
caaaggagaacaagagaaa

SEQ ID NO: 20087 - RNA, 19 nt, Artificial Sequence
  Synthetic
gcagaguaaugaugggaaa

SEQ ID NO: 20088 - RNA, 19 nt, Artificial Sequence
  Synthetic
ggaacauagccaagaauua

SEQ ID NO: 20089 - RNA, 19 nt, Artificial Sequence
  Synthetic
gcaaagaggaagaugaaga

SEQ ID NO: 20090 - RNA, 19 nt, Artificial Sequence
  Synthetic
ggaagacacccaagagaaa

SEQ ID NO: 20091 - RNA, 19 nt, Artificial Sequence
  Synthetic
caauacaagugaugugaua

SEQ ID NO: 20092 - RNA, 19 nt, Artificial Sequence
  Synthetic
agagagaaauugagaccua

SEQ ID NO: 20093 - RNA, 19 nt, Artificial Sequence
  Synthetic
ggaaagaaguggucgaagu

SEQ ID NO: 20094 - RNA, 19 nt, Artificial Sequence
  Synthetic
gaaagaaggagguuauaaa

SEQ ID NO: 20095 - RNA, 19 nt, Artificial Sequence
  Synthetic
caagaaacaagaagacaaa

SEQ ID NO: 20096 - RNA, 19 nt, Artificial Sequence
  Synthetic
aagaaaaggaucaggaaaa

SEQ ID NO: 20097 - RNA, 19 nt, Artificial Sequence
  Synthetic
uguacaaggcccagaauaa

SEQ ID NO: 20098 - RNA, 19 nt, Artificial Sequence
  Synthetic
uuaaaggaguggagagaga

SEQ ID NO: 20099 - RNA, 19 nt, Artificial Sequence
  Synthetic
gaaacaacagcaagaauua

SEQ ID NO: 20100 - RNA, 19 nt, Artificial Sequence
  Synthetic
gagaaagaguuguccaaau

SEQ ID NO: 20101 - RNA, 19 nt, Artificial Sequence
  Synthetic
cagcaguaaucaaggagaa

SEQ ID NO: 20102 - RNA, 19 nt, Artificial Sequence
  Synthetic
gaaaacuguuggagaaaua

SEQ ID NO: 20103 - RNA, 19 nt, Artificial Sequence
  Synthetic
cgagaaggaaacagagcaa

SEQ ID NO: 20104 - RNA, 19 nt, Artificial Sequence
  Synthetic
ccaggaaacuacaggaaca

SEQ ID NO: 20105 - RNA, 19 nt, Artificial Sequence
  Synthetic
aagauaaacucaacagcaa

SEQ ID NO: 20106 - RNA, 19 nt, Artificial Sequence
  Synthetic
cacuaaaucugaagaagaa

SEQ ID NO: 20107 - RNA, 19 nt, Artificial Sequence
  Synthetic
caucaaagauaguuacaga

SEQ ID NO: 20108 - RNA, 19 nt, Artificial Sequence
  Synthetic
acaagaaacaagaagacaa

SEQ ID NO: 20109 - RNA, 19 nt, Artificial Sequence
  Synthetic
gaaagaaggaggaacaaga

SEQ ID NO: 20110 - RNA, 19 nt, Artificial Sequence
  Synthetic
gcaauaaacaguucagaga

SEQ ID NO: 20111 - RNA, 19 nt, Artificial Sequence
  Synthetic
ggucgaaguaggccagaaa

SEQ ID NO: 20112 - RNA, 19 nt, Artificial Sequence
  Synthetic
aggaacaacugaaggugaa

SEQ ID NO: 20113 - RNA, 19 nt, Artificial Sequence
  Synthetic
agagagagugccugaauaa

SEQ ID NO: 20114 - RNA, 19 nt, Artificial Sequence
  Synthetic
gaugaaugguggagaguua

SEQ ID NO: 20115 - RNA, 19 nt, Artificial Sequence
  Synthetic
ccuuagaguuccugagaaa

SEQ ID NO: 20116 - RNA, 19 nt, Artificial Sequence
  Synthetic
gcaaagagcuguucaggaa

SEQ ID NO: 20117 - RNA, 19 nt, Artificial Sequence
  Synthetic
gcagaaaggugguugacaa

SEQ ID NO: 20118 - RNA, 19 nt, Artificial Sequence
  Synthetic
gcaaacuacuggaggaaau

SEQ ID NO: 20119 - RNA, 19 nt, Artificial Sequence
  Synthetic
guaaaguacuugaagcaaa

SEQ ID NO: 20120 - RNA, 19 nt, Artificial Sequence
  Synthetic
aggaagagaaagagagaau

SEQ ID NO: 20121 - RNA, 19 nt, Artificial Sequence
  Synthetic
gaggaaaguuguagauaga

SEQ ID NO: 20122 - RNA, 19 nt, Artificial Sequence
  Synthetic
gaagaucaguugaaagaaa

SEQ ID NO: 20123 - RNA, 19 nt, Artificial Sequence
  Synthetic
ucaaaggacuggaggauuu

SEQ ID NO: 20124 - RNA, 19 nt, Artificial Sequence
  Synthetic
ggaaaguuguagauagaau

SEQ ID NO: 20125 - RNA, 19 nt, Artificial Sequence
  Synthetic
ggguguaacuggaguagaa

SEQ ID NO: 20126 - RNA, 19 nt, Artificial Sequence
  Synthetic
agagagagauggagcgaga

SEQ ID NO: 20127 - RNA, 19 nt, Artificial Sequence
  Synthetic
gaagagaaagagagaauau

SEQ ID NO: 20128 - RNA, 19 nt, Artificial Sequence
  Synthetic
aagcagagcaagagagaga

SEQ ID NO: 20129 - RNA, 19 nt, Artificial Sequence
  Synthetic
guaagaaagcgguggaaca

SEQ ID NO: 20130 - RNA, 19 nt, Artificial Sequence
  Synthetic
gcaauaaggaugaaccuaa

SEQ ID NO: 20131 - RNA, 19 nt, Artificial Sequence
  Synthetic
ugaagagaguccagaacaa

SEQ ID NO: 20132 - RNA, 19 nt, Artificial Sequence
  Synthetic
uggaaaaucuggagaaauu

SEQ ID NO: 20133 - RNA, 19 nt, Artificial Sequence
  Synthetic
gcauauuggaguuggagaa

SEQ ID NO: 20134 - RNA, 19 nt, Artificial Sequence
  Synthetic
uggcaauauucaaggagaa

SEQ ID NO: 20135 - RNA, 19 nt, Artificial Sequence
  Synthetic
gggaaugaauuggaaguaa

SEQ ID NO: 20136 - RNA, 19 nt, Artificial Sequence
  Synthetic
uugaaaugcuccaggaaau

SEQ ID NO: 20137 - RNA, 19 nt, Artificial Sequence
  Synthetic
gugaacugguuuaagaaua

SEQ ID NO: 20138 - RNA, 19 nt, Artificial Sequence
  Synthetic
uggaagagcucaucuguaa

SEQ ID NO: 20139 - RNA, 19 nt, Artificial Sequence
  Synthetic
aaagagagccaaagagcaa

SEQ ID NO: 20140 - RNA, 19 nt, Artificial Sequence
  Synthetic
agaaagagcagcagauaga

SEQ ID NO: 20141 - RNA, 19 nt, Artificial Sequence
  Synthetic
guaaagcaguugaaagaau

SEQ ID NO: 20142 - RNA, 19 nt, Artificial Sequence
  Synthetic
cuagaguagcugagauuaa

SEQ ID NO: 20143 - RNA, 19 nt, Artificial Sequence
  Synthetic
agaaagcgguggaacauaa

SEQ ID NO: 20144 - RNA, 19 nt, Artificial Sequence
  Synthetic
ccagaaaggugauuggaaa

SEQ ID NO: 20145 - RNA, 19 nt, Artificial Sequence
  Synthetic
ccauaagauccuagugaaa

SEQ ID NO: 20146 - RNA, 19 nt, Artificial Sequence
  Synthetic
ggaaguaggcaaaugaaau

SEQ ID NO: 20147 - RNA, 19 nt, Artificial Sequence
  Synthetic
ggagggagauugagaucau

SEQ ID NO: 20148 - RNA, 19 nt, Artificial Sequence
  Synthetic
acagagaccuggaaagaga

SEQ ID NO: 20149 - RNA, 19 nt, Artificial Sequence
  Synthetic
gcaaguuccugcagacauu

SEQ ID NO: 20150 - RNA, 19 nt, Artificial Sequence
  Synthetic
gcacauacggagggagauu

SEQ ID NO: 20151 - RNA, 19 nt, Artificial Sequence
  Synthetic
gauaugggaaguaggcaaa

SEQ ID NO: 20152 - RNA, 19 nt, Artificial Sequence
  Synthetic
aaaucaaagaugagcaaga

SEQ ID NO: 20153 - RNA, 19 nt, Artificial Sequence
  Synthetic
aaugcuauguucugggaaa

SEQ ID NO: 20154 - RNA, 19 nt, Artificial Sequence
  Synthetic
ugaagaagcaggcggugaa

SEQ ID NO: 20155 - RNA, 19 nt, Artificial Sequence
  Synthetic
gcaaaggcaccuacgggaa

SEQ ID NO: 20156 - RNA, 19 nt, Artificial Sequence
  Synthetic
agucaauccggaaggacaa

SEQ ID NO: 20157 - RNA, 19 nt, Artificial Sequence
  Synthetic
ccacagagaccuggaaaga

SEQ ID NO: 20158 - RNA, 19 nt, Artificial Sequence
  Synthetic
cuucaggacucuagaaugu

SEQ ID NO: 20159 - RNA, 19 nt, Artificial Sequence
  Synthetic
ugaacgaagaggauacuaa

SEQ ID NO: 20160 - RNA, 19 nt, Artificial Sequence
  Synthetic
auaagauccuagugaaaca

SEQ ID NO: 20161 - RNA, 19 nt, Artificial Sequence
  Synthetic
ugaaguugcugcugugaau

SEQ ID NO: 20162 - RNA, 19 nt, Artificial Sequence
  Synthetic
gaacgaagaggauacuaaa

SEQ ID NO: 20163 - RNA, 19 nt, Artificial Sequence
  Synthetic
gagcaagaucugaugcaca

SEQ ID NO: 20164 - RNA, 19 nt, Artificial Sequence
  Synthetic
caugaggcauccugggaau

SEQ ID NO: 20165 - RNA, 19 nt, Artificial Sequence
  Synthetic
gaagaggauacuaaagaga

SEQ ID NO: 20166 - RNA, 19 nt, Artificial Sequence
  Synthetic
cgacaggcacugagggucu

SEQ ID NO: 20167 - RNA, 19 nt, Artificial Sequence
  Synthetic
ucgcaaaggcauccucaaa

SEQ ID NO: 20168 - RNA, 19 nt, Artificial Sequence
  Synthetic
ccuacgggaaggugaagaa

SEQ ID NO: 20169 - RNA, 19 nt, Artificial Sequence
  Synthetic
gaacagaguuguccaccga

SEQ ID NO: 20170 - RNA, 19 nt, Artificial Sequence
  Synthetic
augcacauacggagggaga

SEQ ID NO: 20171 - RNA, 19 nt, Artificial Sequence
  Synthetic
ccaugaaguguuugagaac

SEQ ID NO: 20172 - RNA, 19 nt, Artificial Sequence
  Synthetic
ccuaauggucucuaccuaa

SEQ ID NO: 20173 - RNA, 19 nt, Artificial Sequence
  Synthetic
uagugaaacagaucagcaa

SEQ ID NO: 20174 - RNA, 19 nt, Artificial Sequence
  Synthetic
aaacagaggcauugagaaa

SEQ ID NO: 20175 - RNA, 19 nt, Artificial Sequence
  Synthetic
cgaaauaagcaauacguua

SEQ ID NO: 20176 - RNA, 19 nt, Artificial Sequence
  Synthetic
ccucggacgucuacggaaa

SEQ ID NO: 20177 - RNA, 19 nt, Artificial Sequence
  Synthetic
auaaacugcucaaggauua

SEQ ID NO: 20178 - RNA, 19 nt, Artificial Sequence
  Synthetic
ugggugaaguugugcaaua

SEQ ID NO: 20179 - RNA, 19 nt, Artificial Sequence
  Synthetic
caaggaagguaaagugaga

SEQ ID NO: 20180 - RNA, 19 nt, Artificial Sequence
  Synthetic
cgauuagauucaagcaauu

SEQ ID NO: 20181 - RNA, 19 nt, Artificial Sequence
  Synthetic
acuggaaacuuuaggaaga

SEQ ID NO: 20182 - RNA, 19 nt, Artificial Sequence
  Synthetic
gggcagaggugacuucaaa

SEQ ID NO: 20183 - RNA, 19 nt, Artificial Sequence
  Synthetic
cggaagucuuugaggggaa

SEQ ID NO: 20184 - RNA, 19 nt, Artificial Sequence
  Synthetic
cuuaaacccugcaguguua

SEQ ID NO: 20185 - RNA, 19 nt, Artificial Sequence
  Synthetic
ccaaaggguuucugggacu

SEQ ID NO: 20186 - RNA, 19 nt, Artificial Sequence
  Synthetic
ugaugaagcuucugaacca

SEQ ID NO: 20187 - RNA, 19 nt, Artificial Sequence
  Synthetic
gggagagaauccagaccau

SEQ ID NO: 20188 - RNA, 19 nt, Artificial Sequence
  Synthetic
acaucaagcuggcagauuu

SEQ ID NO: 20189 - RNA, 19 nt, Artificial Sequence
  Synthetic
ccaaaugauuaguugaugu

SEQ ID NO: 20190 - RNA, 19 nt, Artificial Sequence
  Synthetic
acgauuagauucaagcaau

SEQ ID NO: 20191 - RNA, 19 nt, Artificial Sequence
  Synthetic
gcaacuucgcgguggugaa

SEQ ID NO: 20192 - RNA, 19 nt, Artificial Sequence
  Synthetic
gcucaaggaguaucggaau

SEQ ID NO: 20193 - RNA, 19 nt, Artificial Sequence
  Synthetic
gaagguaaagugagagguu

SEQ ID NO: 20194 - RNA, 19 nt, Artificial Sequence
  Synthetic
aaacgcagguugcaauaaa

SEQ ID NO: 20195 - RNA, 19 nt, Artificial Sequence
  Synthetic
gauucaagcaauuuggaga

SEQ ID NO: 20196 - RNA, 19 nt, Artificial Sequence
  Synthetic
gcuggcagauuuuggauuu

SEQ ID NO: 20197 - RNA, 19 nt, Artificial Sequence
  Synthetic
cgucacugaauuugcuaaa

SEQ ID NO: 20198 - RNA, 19 nt, Artificial Sequence
  Synthetic
gaucaaaggccucagaaac

SEQ ID NO: 20199 - RNA, 19 nt, Artificial Sequence
  Synthetic
ccaaagauugacccaguua

SEQ ID NO: 20200 - RNA, 19 nt, Artificial Sequence
  Synthetic
ggacuggaaacuuuaggaa

SEQ ID NO: 20201 - RNA, 19 nt, Artificial Sequence
  Synthetic
cagaggaggugaagacauc

SEQ ID NO: 20202 - RNA, 19 nt, Artificial Sequence
  Synthetic
ccaacgggcaccugaguga

SEQ ID NO: 20203 - RNA, 19 nt, Artificial Sequence
  Synthetic
cauaaacugcucaaggauu

SEQ ID NO: 20204 - RNA, 19 nt, Artificial Sequence
  Synthetic
gcucauauuuugaaagcaa

SEQ ID NO: 20205 - RNA, 19 nt, Artificial Sequence
  Synthetic
caagaaagguguugacaga

SEQ ID NO: 20206 - RNA, 19 nt, Artificial Sequence
  Synthetic
gggaaaagauugacaaaga

SEQ ID NO: 20207 - RNA, 19 nt, Artificial Sequence
  Synthetic
ccggagaucucgcggauua

SEQ ID NO: 20208 - RNA, 19 nt, Artificial Sequence
  Synthetic
gcacagagaucucaaacua

SEQ ID NO: 20209 - RNA, 19 nt, Artificial Sequence
  Synthetic
aaauagagcuucacagaau

SEQ ID NO: 20210 - RNA, 19 nt, Artificial Sequence
  Synthetic
ugacaaagaaauagagcuu

SEQ ID NO: 20211 - RNA, 19 nt, Artificial Sequence
  Synthetic
gcagaaaggugcauugauu

SEQ ID NO: 20212 - RNA, 19 nt, Artificial Sequence
  Synthetic
acaaagaaauagagcuuca

SEQ ID NO: 20213 - RNA, 19 nt, Artificial Sequence
  Synthetic
acacagaaggagaacgaua

SEQ ID NO: 20214 - RNA, 19 nt, Artificial Sequence
  Synthetic
gugcauuccuuguuaauaa

SEQ ID NO: 20215 - RNA, 19 nt, Artificial Sequence
  Synthetic
gcauacaguucuugacuuu

SEQ ID NO: 20216 - RNA, 19 nt, Artificial Sequence
  Synthetic
ccucauggaugguggagau

SEQ ID NO: 20217 - RNA, 19 nt, Artificial Sequence
  Synthetic
ggcaauaaagaguaugaaa

SEQ ID NO: 20218 - RNA, 19 nt, Artificial Sequence
  Synthetic
gaacacagaaggagaacga

SEQ ID NO: 20219 - RNA, 19 nt, Artificial Sequence
  Synthetic
gcauaagggaagcaaggua

SEQ ID NO: 20220 - RNA, 19 nt, Artificial Sequence
  Synthetic
caucaaugaggauaggaua

SEQ ID NO: 20221 - RNA, 19 nt, Artificial Sequence
  Synthetic
gaaauaccuucaugaacaa

SEQ ID NO: 20222 - RNA, 19 nt, Artificial Sequence
  Synthetic
ggagaucugccuaguguua

SEQ ID NO: 20223 - RNA, 19 nt, Artificial Sequence
  Synthetic
ccaaagagcaguauuuauu

SEQ ID NO: 20224 - RNA, 19 nt, Artificial Sequence
  Synthetic
aagugacggugcugaaaua

SEQ ID NO: 20225 - RNA, 19 nt, Artificial Sequence
  Synthetic
cuacaaaucucaaagaaac

SEQ ID NO: 20226 - RNA, 19 nt, Artificial Sequence
  Synthetic
gauugugucuggacugaaa

SEQ ID NO: 20227 - RNA, 19 nt, Artificial Sequence
  Synthetic
gaagacaucuacaagcuua

SEQ ID NO: 20228 - RNA, 19 nt, Artificial Sequence
  Synthetic
ggaaaagauugacaaagaa

SEQ ID NO: 20229 - RNA, 19 nt, Artificial Sequence
  Synthetic
ucuucuagcuguugucaua

SEQ ID NO: 20230 - RNA, 19 nt, Artificial Sequence
  Synthetic
agauguaacugaaagacuu

SEQ ID NO: 20231 - RNA, 19 nt, Artificial Sequence
  Synthetic
ggaagaagaugaagaggaa

SEQ ID NO: 20232 - RNA, 19 nt, Artificial Sequence
  Synthetic
gaaaggauccugagagaaa

SEQ ID NO: 20233 - RNA, 19 nt, Artificial Sequence
  Synthetic
gcacacaaauguuggcaaa

SEQ ID NO: 20234 - RNA, 19 nt, Artificial Sequence
  Synthetic
agacagaaccaaagcaaua

SEQ ID NO: 20235 - RNA, 19 nt, Artificial Sequence
  Synthetic
ugugaaaguccaagagaaa

SEQ ID NO: 20236 - RNA, 19 nt, Artificial Sequence
  Synthetic
uggaaagauugcuggauua

SEQ ID NO: 20237 - RNA, 19 nt, Artificial Sequence
  Synthetic
gagaaaagcaagagaaaga

SEQ ID NO: 20238 - RNA, 19 nt, Artificial Sequence
  Synthetic
uuauaaagggccagaaaua

SEQ ID NO: 20239 - RNA, 19 nt, Artificial Sequence
  Synthetic
aggaagaugaggaggacaa

SEQ ID NO: 20240 - RNA, 19 nt, Artificial Sequence
  Synthetic
guguaaacauugacaggua

SEQ ID NO: 20241 - RNA, 19 nt, Artificial Sequence
  Synthetic
cugaaaggauccugagaga

SEQ ID NO: 20242 - RNA, 19 nt, Artificial Sequence
  Synthetic
uuaagaggguacagaauua

SEQ ID NO: 20243 - RNA, 19 nt, Artificial Sequence
  Synthetic
cgauaaagauagcggguuc

SEQ ID NO: 20244 - RNA, 19 nt, Artificial Sequence
  Synthetic
gugaaaagguggcaguaaa

SEQ ID NO: 20245 - RNA, 19 nt, Artificial Sequence
  Synthetic
gucuuaagcuauaguguaa

SEQ ID NO: 20246 - RNA, 19 nt, Artificial Sequence
  Synthetic
gggaagaagcucacuacaa

SEQ ID NO: 20247 - RNA, 19 nt, Artificial Sequence
  Synthetic
gagaaaucuacguggaaaa

SEQ ID NO: 20248 - RNA, 19 nt, Artificial Sequence
  Synthetic
gagagaaaagcaagagaaa

SEQ ID NO: 20249 - RNA, 19 nt, Artificial Sequence
  Synthetic
cuggaaaccaacagguaua

SEQ ID NO: 20250 - RNA, 19 nt, Artificial Sequence
  Synthetic
gugugaaaguccaagagaa

SEQ ID NO: 20251 - RNA, 19 nt, Artificial Sequence
  Synthetic
gcaugaaacuagugcagca

SEQ ID NO: 20252 - RNA, 19 nt, Artificial Sequence
  Synthetic
gagcguaacaucuguauua

SEQ ID NO: 20253 - RNA, 19 nt, Artificial Sequence
  Synthetic
gaucauggauugcaaauau

SEQ ID NO: 20254 - RNA, 19 nt, Artificial Sequence
  Synthetic
uggaacggauaaagagcaa

SEQ ID NO: 20255 - RNA, 19 nt, Artificial Sequence
  Synthetic
cauuauugauccacagaau

SEQ ID NO: 20256 - RNA, 19 nt, Artificial Sequence
  Synthetic
ucugcaagcccgagcaaua

SEQ ID NO: 20257 - RNA, 19 nt, Artificial Sequence
  Synthetic
cgaaaagccuauuauguaa

SEQ ID NO: 20258 - RNA, 19 nt, Artificial Sequence
  Synthetic
ggauaaagagcaagaaccu

SEQ ID NO: 20259 - RNA, 19 nt, Artificial Sequence
  Synthetic
gugacaaucuugacaccaa

SEQ ID NO: 20260 - RNA, 19 nt, Artificial Sequence
  Synthetic
gcaagaaccaccugagaaa

SEQ ID NO: 20261 - RNA, 19 nt, Artificial Sequence
  Synthetic
gcaccagcucggagagaaa

SEQ ID NO: 20262 - RNA, 19 nt, Artificial Sequence
  Synthetic
ggacaauauaccagcuuuu

SEQ ID NO: 20263 - RNA, 19 nt, Artificial Sequence
  Synthetic
ccgaauuccacaaggauuu

SEQ ID NO: 20264 - RNA, 19 nt, Artificial Sequence
  Synthetic
cgagauucugagagagcaa

SEQ ID NO: 20265 - RNA, 19 nt, Artificial Sequence
  Synthetic
agagaaaggagguuccaua

SEQ ID NO: 20266 - RNA, 19 nt, Artificial Sequence
  Synthetic
caagaagagucucagauau

SEQ ID NO: 20267 - RNA, 19 nt, Artificial Sequence
  Synthetic
acaagaagagucucagaua

SEQ ID NO: 20268 - RNA, 19 nt, Artificial Sequence
  Synthetic
caacuuugauccagcagaa

SEQ ID NO: 20269 - RNA, 19 nt, Artificial Sequence
  Synthetic
ccaucaaccuucuuauuaa

SEQ ID NO: 20270 - RNA, 19 nt, Artificial Sequence
  Synthetic
cagagaggaggcaaagaaa

SEQ ID NO: 20271 - RNA, 19 nt, Artificial Sequence
  Synthetic
ccagagaggaggcaaagaa

SEQ ID NO: 20272 - RNA, 19 nt, Artificial Sequence
  Synthetic
gagaggaggcaaagaaaau

SEQ ID NO: 20273 - RNA, 19 nt, Artificial Sequence
  Synthetic
cugaggaagauaaggaaaa

SEQ ID NO: 20274 - RNA, 19 nt, Artificial Sequence
  Synthetic
uagccagagaggaggcaaa

SEQ ID NO: 20275 - RNA, 19 nt, Artificial Sequence
  Synthetic
auucguuacuguugugaaa

SEQ ID NO: 20276 - RNA, 19 nt, Artificial Sequence
  Synthetic
ggaaggaagauuugauguu

SEQ ID NO: 20277 - RNA, 19 nt, Artificial Sequence
  Synthetic
gaaaagugauccuaaacaa

SEQ ID NO: 20278 - RNA, 19 nt, Artificial Sequence
  Synthetic
ggaaggaggaagagacauc

SEQ ID NO: 20279 - RNA, 19 nt, Artificial Sequence
  Synthetic
acccuuggauuuagaauua

SEQ ID NO: 20280 - RNA, 19 nt, Artificial Sequence
  Synthetic
cuauagagacccuuggauu

SEQ ID NO: 20281 - RNA, 19 nt, Artificial Sequence
  Synthetic
ugagagagcaaccggacaa

SEQ ID NO: 20282 - RNA, 19 nt, Artificial Sequence
  Synthetic
ucuagagaaaagagagaaa

SEQ ID NO: 20283 - RNA, 19 nt, Artificial Sequence
  Synthetic
acacauagccagagaggag

SEQ ID NO: 20284 - RNA, 19 nt, Artificial Sequence
  Synthetic
gagagcaaccggacaauau

SEQ ID NO: 20285 - RNA, 19 nt, Artificial Sequence
  Synthetic
ugucaugagcauuuguuua

SEQ ID NO: 20286 - RNA, 19 nt, Artificial Sequence
  Synthetic
agagguugcugcugucaaa

SEQ ID NO: 20287 - RNA, 19 nt, Artificial Sequence
  Synthetic
ugagaaaagugauccuaaa

SEQ ID NO: 20288 - RNA, 19 nt, Artificial Sequence
  Synthetic
uauagagacccuuggauuu

SEQ ID NO: 20289 - RNA, 19 nt, Artificial Sequence
  Synthetic
gaauaaauccucucuauca

SEQ ID NO: 20290 - RNA, 19 nt, Artificial Sequence
  Synthetic
gcugcgaaguugagcgaaa

SEQ ID NO: 20291 - RNA, 19 nt, Artificial Sequence
  Synthetic
gugagaagguggaggcuau

SEQ ID NO: 20292 - RNA, 19 nt, Artificial Sequence
  Synthetic
cgaaccaaauccaaauaaa

SEQ ID NO: 20293 - RNA, 19 nt, Artificial Sequence
  Synthetic
gggaauugaugguuagcga

SEQ ID NO: 20294 - RNA, 19 nt, Artificial Sequence
  Synthetic
augaagaccuccugaccaa

SEQ ID NO: 20295 - RNA, 19 nt, Artificial Sequence
  Synthetic
cgacgaggacuuugugcua

SEQ ID NO: 20296 - RNA, 19 nt, Artificial Sequence
  Synthetic
auguggaccuagagaguga

SEQ ID NO: 20297 - RNA, 19 nt, Artificial Sequence
  Synthetic
gcuaugagcaggucaccaa

SEQ ID NO: 20298 - RNA, 19 nt, Artificial Sequence
  Synthetic
auggagaagggcaggcaua

SEQ ID NO: 20299 - RNA, 19 nt, Artificial Sequence
  Synthetic
gggcaggcauauggaguau

SEQ ID NO: 20300 - RNA, 19 nt, Artificial Sequence
  Synthetic
accuagagagugagaagua

SEQ ID NO: 20301 - RNA, 19 nt, Artificial Sequence
  Synthetic
ggaccuagagagugagaag

SEQ ID NO: 20302 - RNA, 19 nt, Artificial Sequence
  Synthetic
ggaugggaaagguguguuu

SEQ ID NO: 20303 - RNA, 19 nt, Artificial Sequence
  Synthetic
gcaccgauaaggagcugaa

SEQ ID NO: 20304 - RNA, 19 nt, Artificial Sequence
  Synthetic
gaaccauuaugcuggcuau

SEQ ID NO: 20305 - RNA, 19 nt, Artificial Sequence
  Synthetic
ugacauucccagccugaaa

SEQ ID NO: 20306 - RNA, 19 nt, Artificial Sequence
  Synthetic
gcaccugggcagugagaug

SEQ ID NO: 20307 - RNA, 19 nt, Artificial Sequence
  Synthetic
ccaaauccaaauaaaguga

SEQ ID NO: 20308 - RNA, 19 nt, Artificial Sequence
  Synthetic
ccacgaaccaaauccaaau

SEQ ID NO: 20309 - RNA, 19 nt, Artificial Sequence
  Synthetic
ggaaagguguguuugcagu

SEQ ID NO: 20310 - RNA, 19 nt, Artificial Sequence
  Synthetic
gagacgggcugaugcacga

SEQ ID NO: 20311 - RNA, 19 nt, Artificial Sequence
  Synthetic
ggacaggccagaaugaagu

SEQ ID NO: 20312 - RNA, 19 nt, Artificial Sequence
  Synthetic
gauggggaauugaugguua

SEQ ID NO: 20313 - RNA, 19 nt, Artificial Sequence
  Synthetic
ccuagagagugagaaguau

SEQ ID NO: 20314 - RNA, 19 nt, Artificial Sequence
  Synthetic
auguaaggccuucuaguuu

SEQ ID NO: 20315 - RNA, 19 nt, Artificial Sequence
  Synthetic
aagaguggguuccaagaca

SEQ ID NO: 20316 - RNA, 19 nt, Artificial Sequence
  Synthetic
gcagcuuccuugaaccauu

SEQ ID NO: 20317 - RNA, 19 nt, Artificial Sequence
  Synthetic
gggacgcucugguggucau

SEQ ID NO: 20318 - RNA, 19 nt, Artificial Sequence
  Synthetic
gaaccaaauccaaauaaag

SEQ ID NO: 20319 - RNA, 19 nt, Artificial Sequence
  Synthetic
gcgcugugccuuagugucu

SEQ ID NO: 20320 - RNA, 19 nt, Artificial Sequence
  Synthetic
cgucacgguuaaagagaaa

SEQ ID NO: 20321 - RNA, 19 nt, Artificial Sequence
  Synthetic
gggaggaagcugugaagau

SEQ ID NO: 20322 - RNA, 19 nt, Artificial Sequence
  Synthetic
gagcagaggaccagcagau

SEQ ID NO: 20323 - RNA, 19 nt, Artificial Sequence
  Synthetic
agacagaacgacagaacca

SEQ ID NO: 20324 - RNA, 19 nt, Artificial Sequence
  Synthetic
gcauagagcgcaggaacaa

SEQ ID NO: 20325 - RNA, 19 nt, Artificial Sequence
  Synthetic
ccauuuagcuggccaauca

SEQ ID NO: 20326 - RNA, 19 nt, Artificial Sequence
  Synthetic
ugaaaaggucuaugcaaua

SEQ ID NO: 20327 - RNA, 19 nt, Artificial Sequence
  Synthetic
ggucaggccaggacaguga

SEQ ID NO: 20328 - RNA, 19 nt, Artificial Sequence
  Synthetic
ccucagacucagcggccua

SEQ ID NO: 20329 - RNA, 19 nt, Artificial Sequence
  Synthetic
gcagaugaauggacaccuu

SEQ ID NO: 20330 - RNA, 19 nt, Artificial Sequence
  Synthetic
cagaggaccagcagaugaa

SEQ ID NO: 20331 - RNA, 19 nt, Artificial Sequence
  Synthetic
cagaggagcagcaggacca

SEQ ID NO: 20332 - RNA, 19 nt, Artificial Sequence
  Synthetic
gaacaagcgcaacguccaa

SEQ ID NO: 20333 - RNA, 19 nt, Artificial Sequence
  Synthetic
gcgggagcccugaaacuaa

SEQ ID NO: 20334 - RNA, 19 nt, Artificial Sequence
  Synthetic
aagcagaggagcagcagga

SEQ ID NO: 20335 - RNA, 19 nt, Artificial Sequence
  Synthetic
gcagaggaccagcagauga

SEQ ID NO: 20336 - RNA, 19 nt, Artificial Sequence
  Synthetic
gguagugccugaucaauga

SEQ ID NO: 20337 - RNA, 19 nt, Artificial Sequence
  Synthetic
gaggguagugccugaucaa

SEQ ID NO: 20338 - RNA, 19 nt, Artificial Sequence
  Synthetic
gaauggacaccuugaagca

SEQ ID NO: 20339 - RNA, 19 nt, Artificial Sequence
  Synthetic
cgggagcccugaaacuaaa

SEQ ID NO: 20340 - RNA, 19 nt, Artificial Sequence
  Synthetic
gcgcuaggauuugcacuaa

SEQ ID NO: 20341 - RNA, 19 nt, Artificial Sequence
  Synthetic
aaacuaaacaagcuuggua

SEQ ID NO: 20342 - RNA, 19 nt, Artificial Sequence
  Synthetic
gcuccuccauggcgaguuu

SEQ ID NO: 20343 - RNA, 19 nt, Artificial Sequence
  Synthetic
gaaaaggucuaugcaauaa

SEQ ID NO: 20344 - RNA, 19 nt, Artificial Sequence
  Synthetic
ucgauagcuuuccggaaga

SEQ ID NO: 20345 - RNA, 19 nt, Artificial Sequence
  Synthetic
ggguagugccugaucaaug

SEQ ID NO: 20346 - RNA, 19 nt, Artificial Sequence
  Synthetic
aauaaaggcagucgcuuca

SEQ ID NO: 20347 - RNA, 19 nt, Artificial Sequence
  Synthetic
ggaggaagcugugaagaug

SEQ ID NO: 20348 - RNA, 19 nt, Artificial Sequence
  Synthetic
caaggcagcucuacacuca

SEQ ID NO: 20349 - RNA, 19 nt, Artificial Sequence
  Synthetic
gagacgggcugcuccauga

SEQ ID NO: 20350 - RNA, 19 nt, Artificial Sequence
  Synthetic
gagagaaccuggugugcaa

SEQ ID NO: 20351 - RNA, 19 nt, Artificial Sequence
  Synthetic
gcagagaacccgagaggga

SEQ ID NO: 20352 - RNA, 19 nt, Artificial Sequence
  Synthetic
gugcagguguggagagaga

SEQ ID NO: 20353 - RNA, 19 nt, Artificial Sequence
  Synthetic
ggaagaggaaccaggagaa

SEQ ID NO: 20354 - RNA, 19 nt, Artificial Sequence
  Synthetic
ccaacauccuggugggaga

SEQ ID NO: 20355 - RNA, 19 nt, Artificial Sequence
  Synthetic
ggugaaagaggacguguua

SEQ ID NO: 20356 - RNA, 19 nt, Artificial Sequence
  Synthetic
ucaacaacacagagggaga

SEQ ID NO: 20357 - RNA, 19 nt, Artificial Sequence
  Synthetic
gcaacaagagcaagcccaa

SEQ ID NO: 20358 - RNA, 19 nt, Artificial Sequence
  Synthetic
uaacucaugaggagggaaa

SEQ ID NO: 20359 - RNA, 19 nt, Artificial Sequence
  Synthetic
ggacauggcugcucagauc

SEQ ID NO: 20360 - RNA, 19 nt, Artificial Sequence
  Synthetic
ucacggaguacaugagcaa

SEQ ID NO: 20361 - RNA, 19 nt, Artificial Sequence
  Synthetic
cagaauugguuguaaauac

SEQ ID NO: 20362 - RNA, 19 nt, Artificial Sequence
  Synthetic
cguccaagccgcagacuca

SEQ ID NO: 20363 - RNA, 19 nt, Artificial Sequence
  Synthetic
aggcccaggucaugaagaa

SEQ ID NO: 20364 - RNA, 19 nt, Artificial Sequence
  Synthetic
ugacugagcucaccacaaa

SEQ ID NO: 20365 - RNA, 19 nt, Artificial Sequence
  Synthetic
augagaagcuggugcaguu

SEQ ID NO: 20366 - RNA, 19 nt, Artificial Sequence
  Synthetic
gcacaggacagacaggcua

SEQ ID NO: 20367 - RNA, 19 nt, Artificial Sequence
  Synthetic
gccucaacgugaagcacua

SEQ ID NO: 20368 - RNA, 19 nt, Artificial Sequence
  Synthetic
uggcguacguggagcggau

SEQ ID NO: 20369 - RNA, 19 nt, Artificial Sequence
  Synthetic
auccagaauugguuguaaa

SEQ ID NO: 20370 - RNA, 19 nt, Artificial Sequence
  Synthetic
ccaugugcguccauauuua

SEQ ID NO: 20371 - RNA, 19 nt, Artificial Sequence
  Synthetic
gcaaucaagcagacauaga

SEQ ID NO: 20372 - RNA, 19 nt, Artificial Sequence
  Synthetic
gcucagcacaggacagaca

SEQ ID NO: 20373 - RNA, 19 nt, Artificial Sequence
  Synthetic
acguggagcggaugaacua

SEQ ID NO: 20374 - RNA, 19 nt, Artificial Sequence
  Synthetic
ugaagaagcugaggcauga

SEQ ID NO: 20375 - RNA, 19 nt, Artificial Sequence
  Synthetic
augaagaagcugaggcaug

SEQ ID NO: 20376 - RNA, 19 nt, Artificial Sequence
  Synthetic
cguccauauuuaacaugua

SEQ ID NO: 20377 - RNA, 19 nt, Artificial Sequence
  Synthetic
cacaaacagaccucagaaa

SEQ ID NO: 20378 - RNA, 19 nt, Artificial Sequence
  Synthetic
cgagaaagugagaccacga

SEQ ID NO: 20379 - RNA, 19 nt, Artificial Sequence
  Synthetic
agaaagugagaccacgaaa

SEQ ID NO: 20380 - RNA, 19 nt, Artificial Sequence
  Synthetic
ucacggaacucaugcgcaa

SEQ ID NO: 20381 - RNA, 19 nt, Artificial Sequence
  Synthetic
gcuccaagaucccggucaa

SEQ ID NO: 20382 - RNA, 19 nt, Artificial Sequence
  Synthetic
gggagaagcugcacgccau

SEQ ID NO: 20383 - RNA, 19 nt, Artificial Sequence
  Synthetic
ccaaggagauccagacacu

SEQ ID NO: 20384 - RNA, 19 nt, Artificial Sequence
  Synthetic
uggcugagggcaugagcua

SEQ ID NO: 20385 - RNA, 19 nt, Artificial Sequence
  Synthetic
ccuaugaagggaugaccaa

SEQ ID NO: 20386 - RNA, 19 nt, Artificial Sequence
  Synthetic
gaucaaggucaucaaguca

SEQ ID NO: 20387 - RNA, 19 nt, Artificial Sequence
  Synthetic
ggaagcugggugaaggcua

SEQ ID NO: 20388 - RNA, 19 nt, Artificial Sequence
  Synthetic
ugagcuaccuggaggagca

SEQ ID NO: 20389 - RNA, 19 nt, Artificial Sequence
  Synthetic
acuacaaggccaacuggaa

SEQ ID NO: 20390 - RNA, 19 nt, Artificial Sequence
  Synthetic
ucaccuacuacaaggccaa

SEQ ID NO: 20391 - RNA, 19 nt, Artificial Sequence
  Synthetic
ccugcaagguggcugacuu

SEQ ID NO: 20392 - RNA, 19 nt, Artificial Sequence
  Synthetic
cgaucaaggucaucaaguc

SEQ ID NO: 20393 - RNA, 19 nt, Artificial Sequence
  Synthetic
aaggagauccagacacuga

SEQ ID NO: 20394 - RNA, 19 nt, Artificial Sequence
  Synthetic
ucacugaccucgccaagga

SEQ ID NO: 20395 - RNA, 19 nt, Artificial Sequence
  Synthetic
ccaacaugaagcucacuga

SEQ ID NO: 20396 - RNA, 19 nt, Artificial Sequence
  Synthetic
ggccaauuaucgugucuuc

SEQ ID NO: 20397 - RNA, 19 nt, Artificial Sequence
  Synthetic
ucaagucagccaacaugaa

SEQ ID NO: 20398 - RNA, 19 nt, Artificial Sequence
  Synthetic
gcagaagggacggcucuuu

SEQ ID NO: 20399 - RNA, 19 nt, Artificial Sequence
  Synthetic
ccaagaucccggucaagug

SEQ ID NO: 20400 - RNA, 19 nt, Artificial Sequence
  Synthetic
gcucaaggacgacaucuac

SEQ ID NO: 20401 - RNA, 19 nt, Artificial Sequence
  Synthetic
gcugggugaaggcuacuuu

SEQ ID NO: 20402 - RNA, 19 nt, Artificial Sequence
  Synthetic
cagaagggacggcucuuuc

SEQ ID NO: 20403 - RNA, 19 nt, Artificial Sequence
  Synthetic
caucaagucagccaacaug

SEQ ID NO: 20404 - RNA, 19 nt, Artificial Sequence
  Synthetic
ccaauuaucgugucuucuc

SEQ ID NO: 20405 - RNA, 19 nt, Artificial Sequence
  Synthetic
ggagauccagacacugaag

SEQ ID NO: 20406 - RNA, 19 nt, Artificial Sequence
  Synthetic
caagucagccaacaugaag

SEQ ID NO: 20407 - RNA, 19 nt, Artificial Sequence
  Synthetic
gcucuuccuugcgcucuau

SEQ ID NO: 20408 - RNA, 19 nt, Artificial Sequence
  Synthetic
caggcucugugcccucgaa

SEQ ID NO: 20409 - RNA, 19 nt, Artificial Sequence
  Synthetic
caucgucacggaacucaug

SEQ ID NO: 20410 - RNA, 19 nt, Artificial Sequence
  Synthetic
gcucaaagcaauugggaaa

SEQ ID NO: 20411 - RNA, 19 nt, Artificial Sequence
  Synthetic
cggaaggaguagaguuuaa

SEQ ID NO: 20412 - RNA, 19 nt, Artificial Sequence
  Synthetic
ccaagaagaaagugaaauu

SEQ ID NO: 20413 - RNA, 19 nt, Artificial Sequence
  Synthetic
acuuguagauccagagaaa

SEQ ID NO: 20414 - RNA, 19 nt, Artificial Sequence
  Synthetic
gagaaugccuugaagacaa

SEQ ID NO: 20415 - RNA, 19 nt, Artificial Sequence
  Synthetic
agccaaagcucuuaguaaa

SEQ ID NO: 20416 - RNA, 19 nt, Artificial Sequence
  Synthetic
ccaaaguguuagccaauaa

SEQ ID NO: 20417 - RNA, 19 nt, Artificial Sequence
  Synthetic
gaaauuaaccaaugcggaa

SEQ ID NO: 20418 - RNA, 19 nt, Artificial Sequence
  Synthetic
uagaggaguuaaagcauaa

SEQ ID NO: 20419 - RNA, 19 nt, Artificial Sequence
  Synthetic
gcucauuuguccuugauaa

SEQ ID NO: 20420 - RNA, 19 nt, Artificial Sequence
  Synthetic
gaaacaacuacaagcuaua

SEQ ID NO: 20421 - RNA, 19 nt, Artificial Sequence
  Synthetic
caacagcuguggaaacaaa

SEQ ID NO: 20422 - RNA, 19 nt, Artificial Sequence
  Synthetic
gaacaaggacagggagauu

SEQ ID NO: 20423 - RNA, 19 nt, Artificial Sequence
  Synthetic
gaauggaaguuucaaggaa

SEQ ID NO: 20424 - RNA, 19 nt, Artificial Sequence
  Synthetic
gcuuuauggacaaguguua

SEQ ID NO: 20425 - RNA, 19 nt, Artificial Sequence
  Synthetic
ggggaagaaagaaggguaa

SEQ ID NO: 20426 - RNA, 19 nt, Artificial Sequence
  Synthetic
agauauugauagugccauu

SEQ ID NO: 20427 - RNA, 19 nt, Artificial Sequence
  Synthetic
ugaaggagcuuuauggaca

SEQ ID NO: 20428 - RNA, 19 nt, Artificial Sequence
  Synthetic
gggaagaaagaaggguaaa

SEQ ID NO: 20429 - RNA, 19 nt, Artificial Sequence
  Synthetic
aaagaaacagcaacagaaa

SEQ ID NO: 20430 - RNA, 19 nt, Artificial Sequence
  Synthetic
auagagaucucguccgaaa

SEQ ID NO: 20431 - RNA, 19 nt, Artificial Sequence
  Synthetic
caacaaagaugacguaacu

SEQ ID NO: 20432 - RNA, 19 nt, Artificial Sequence
  Synthetic
gcugaacagaauugagaau

SEQ ID NO: 20433 - RNA, 19 nt, Artificial Sequence
  Synthetic
gugaaaagcagcacacaaa

SEQ ID NO: 20434 - RNA, 19 nt, Artificial Sequence
  Synthetic
gaagcauagaggaguuaaa

SEQ ID NO: 20435 - RNA, 19 nt, Artificial Sequence
  Synthetic
caucaauacucacaccaaa

SEQ ID NO: 20436 - RNA, 19 nt, Artificial Sequence
  Synthetic
ggaggcaauuagugaccua

SEQ ID NO: 20437 - RNA, 19 nt, Artificial Sequence
  Synthetic
aggaagacccacaggcaga

SEQ ID NO: 20438 - RNA, 19 nt, Artificial Sequence
  Synthetic
aaagaagaaagguggaaaa

SEQ ID NO: 20439 - RNA, 19 nt, Artificial Sequence
  Synthetic
cggaagaaggaggcaauua

SEQ ID NO: 20440 - RNA, 19 nt, Artificial Sequence
  Synthetic
ggacaaagcccaaaggaaa

SEQ ID NO: 20441 - RNA, 19 nt, Artificial Sequence
  Synthetic
ggaagaaauuuguggcaau

SEQ ID NO: 20442 - RNA, 19 nt, Artificial Sequence
  Synthetic
gggaaauccuucagcaauu

SEQ ID NO: 20443 - RNA, 19 nt, Artificial Sequence
  Synthetic
cagaaaagcucaaggugaa

SEQ ID NO: 20444 - RNA, 19 nt, Artificial Sequence
  Synthetic
gcuccaggcccgaaagaaa

SEQ ID NO: 20445 - RNA, 19 nt, Artificial Sequence
  Synthetic
gccaaagacuaauggacua

SEQ ID NO: 20446 - RNA, 19 nt, Artificial Sequence
  Synthetic
cagcagaaauuaauugcaa

SEQ ID NO: 20447 - RNA, 19 nt, Artificial Sequence
  Synthetic
acauuaaaccagagaacau

SEQ ID NO: 20448 - RNA, 19 nt, Artificial Sequence
  Synthetic
ggaaaugcuuguuggcaca

SEQ ID NO: 20449 - RNA, 19 nt, Artificial Sequence
  Synthetic
ggaaauaggcagcuguaga

SEQ ID NO: 20450 - RNA, 19 nt, Artificial Sequence
  Synthetic
gcaagaagaaucagagagu

SEQ ID NO: 20451 - RNA, 19 nt, Artificial Sequence
  Synthetic
ggaccaaggccaagaagga

SEQ ID NO: 20452 - RNA, 19 nt, Artificial Sequence
  Synthetic
acacauaucugcaugguau

SEQ ID NO: 20453 - RNA, 19 nt, Artificial Sequence
  Synthetic
aggcagaauuacuagagaa

SEQ ID NO: 20454 - RNA, 19 nt, Artificial Sequence
  Synthetic
gcaauagacuagaacugaa

SEQ ID NO: 20455 - RNA, 19 nt, Artificial Sequence
  Synthetic
ggacucgaauuuacagaaa

SEQ ID NO: 20456 - RNA, 19 nt, Artificial Sequence
  Synthetic
gagauguacuugaggcuuu

SEQ ID NO: 20457 - RNA, 19 nt, Artificial Sequence
  Synthetic
cagcacaucucaagaaaca

SEQ ID NO: 20458 - RNA, 19 nt, Artificial Sequence
  Synthetic
ugaaacagcacuagaugaa

SEQ ID NO: 20459 - RNA, 19 nt, Artificial Sequence
  Synthetic
gccuaaaccagcugacaaa

SEQ ID NO: 20460 - RNA, 19 nt, Artificial Sequence
  Synthetic
ccaugugauccgaaaguua

SEQ ID NO: 20461 - RNA, 19 nt, Artificial Sequence
  Synthetic
gggaagaaauuuguggcaa

SEQ ID NO: 20462 - RNA, 19 nt, Artificial Sequence
  Synthetic
uugaggaaauggagaaaga

SEQ ID NO: 20463 - RNA, 19 nt, Artificial Sequence
  Synthetic
caggaauucuggugauauu

SEQ ID NO: 20464 - RNA, 19 nt, Artificial Sequence
  Synthetic
aagcauucgggcagagaua

SEQ ID NO: 20465 - RNA, 19 nt, Artificial Sequence
  Synthetic
ugaagaugaacaagagcaa

SEQ ID NO: 20466 - RNA, 19 nt, Artificial Sequence
  Synthetic
ggcaaugaaaguaguuaaa

SEQ ID NO: 20467 - RNA, 19 nt, Artificial Sequence
  Synthetic
ugugaaaauuggagaucua

SEQ ID NO: 20468 - RNA, 19 nt, Artificial Sequence
  Synthetic
gcccaaaggaaaucugaaa

SEQ ID NO: 20469 - RNA, 19 nt, Artificial Sequence
  Synthetic
ccacagaggugcaacuuga

SEQ ID NO: 20470 - RNA, 19 nt, Artificial Sequence
  Synthetic
gaaagaagaugcugagaaa

SEQ ID NO: 20471 - RNA, 19 nt, Artificial Sequence
  Synthetic
gcgagaagcugaaaggaaa

SEQ ID NO: 20472 - RNA, 19 nt, Artificial Sequence
  Synthetic
gcagaaaccuauaggaaaa

SEQ ID NO: 20473 - RNA, 19 nt, Artificial Sequence
  Synthetic
gaaacgaaguugagaaaau

SEQ ID NO: 20474 - RNA, 19 nt, Artificial Sequence
  Synthetic
gcucaaauguguucgagaa

SEQ ID NO: 20475 - RNA, 19 nt, Artificial Sequence
  Synthetic
uagaagaauuggagcgaga

SEQ ID NO: 20476 - RNA, 19 nt, Artificial Sequence
  Synthetic
acaaaguggcucuggguua

SEQ ID NO: 20477 - RNA, 19 nt, Artificial Sequence
  Synthetic
ggacaucauuccuguauua

SEQ ID NO: 20478 - RNA, 19 nt, Artificial Sequence
  Synthetic
uaacagaaguacugcgaau

SEQ ID NO: 20479 - RNA, 19 nt, Artificial Sequence
  Synthetic
cgaugaagaugaugaugaa

SEQ ID NO: 20480 - RNA, 19 nt, Artificial Sequence
  Synthetic
aagaagaugcugagaaaga

SEQ ID NO: 20481 - RNA, 19 nt, Artificial Sequence
  Synthetic
gaacacaagguaugguaua

SEQ ID NO: 20482 - RNA, 19 nt, Artificial Sequence
  Synthetic
gaucauucauacugacaua

SEQ ID NO: 20483 - RNA, 19 nt, Artificial Sequence
  Synthetic
cagcagaaaccuauaggaa

SEQ ID NO: 20484 - RNA, 19 nt, Artificial Sequence
  Synthetic
caaucuugguugugaauau

SEQ ID NO: 20485 - RNA, 19 nt, Artificial Sequence
  Synthetic
ucucacagcucaaagauaa

SEQ ID NO: 20486 - RNA, 19 nt, Artificial Sequence
  Synthetic
aggcugaguuauuggagaa

SEQ ID NO: 20487 - RNA, 19 nt, Artificial Sequence
  Synthetic
cugcaaagguggauaucau

SEQ ID NO: 20488 - RNA, 19 nt, Artificial Sequence
  Synthetic
ugaagaugaugaugaagaa

SEQ ID NO: 20489 - RNA, 19 nt, Artificial Sequence
  Synthetic
gcccagaggugaaacuaaa

SEQ ID NO: 20490 - RNA, 19 nt, Artificial Sequence
  Synthetic
caagaaauagcaaggaaau

SEQ ID NO: 20491 - RNA, 19 nt, Artificial Sequence
  Synthetic
gccaaauggacgacauaaa

SEQ ID NO: 20492 - RNA, 19 nt, Artificial Sequence
  Synthetic
cuucaaucgcagaggagaa

SEQ ID NO: 20493 - RNA, 19 nt, Artificial Sequence
  Synthetic
gaagaugcugagaaagaaa

SEQ ID NO: 20494 - RNA, 19 nt, Artificial Sequence
  Synthetic
cagaaagugauuacacaua

SEQ ID NO: 20495 - RNA, 19 nt, Artificial Sequence
  Synthetic
cugcaaaggacaaugguga

SEQ ID NO: 20496 - RNA, 19 nt, Artificial Sequence
  Synthetic
agaaagaagaugcugagaa

SEQ ID NO: 20497 - RNA, 19 nt, Artificial Sequence
  Synthetic
ggaaaagauuuguugcaau

SEQ ID NO: 20498 - RNA, 19 nt, Artificial Sequence
  Synthetic
caaauguguucgagaaagu

SEQ ID NO: 20499 - RNA, 19 nt, Artificial Sequence
  Synthetic
ccacauagcccacaucaua

SEQ ID NO: 20500 - RNA, 19 nt, Artificial Sequence
  Synthetic
gagacaaacuucugagcga

SEQ ID NO: 20501 - RNA, 19 nt, Artificial Sequence
  Synthetic
uccaagaaguacaagggua

SEQ ID NO: 20502 - RNA, 19 nt, Artificial Sequence
  Synthetic
gcaugggcgucgugcucua

SEQ ID NO: 20503 - RNA, 19 nt, Artificial Sequence
  Synthetic
gcagcuacuccaaggugaa

SEQ ID NO: 20504 - RNA, 19 nt, Artificial Sequence
  Synthetic
gggaaacuguacaucguga

SEQ ID NO: 20505 - RNA, 19 nt, Artificial Sequence
  Synthetic
cgaggugugcaacgggaaa

SEQ ID NO: 20506 - RNA, 19 nt, Artificial Sequence
  Synthetic
ccacauccaagaaguacaa

SEQ ID NO: 20507 - RNA, 19 nt, Artificial Sequence
  Synthetic
gcgucaagcucaccgacuu

SEQ ID NO: 20508 - RNA, 19 nt, Artificial Sequence
  Synthetic
agacaaacuucugagcgaa

SEQ ID NO: 20509 - RNA, 19 nt, Artificial Sequence
  Synthetic
gcacaauuggagagggcag

SEQ ID NO: 20510 - RNA, 19 nt, Artificial Sequence
  Synthetic
gaaaacgagacaauugaaa

SEQ ID NO: 20511 - RNA, 19 nt, Artificial Sequence
  Synthetic
cgagacaauugaaaaguca

SEQ ID NO: 20512 - RNA, 19 nt, Artificial Sequence
  Synthetic
ccgggugguuccagccauu

SEQ ID NO: 20513 - RNA, 19 nt, Artificial Sequence
  Synthetic
ccggggaagucaugcauuu

SEQ ID NO: 20514 - RNA, 19 nt, Artificial Sequence
  Synthetic
gcaacgggaaacuguacau

SEQ ID NO: 20515 - RNA, 19 nt, Artificial Sequence
  Synthetic
gggaagucaugcauuucuu

SEQ ID NO: 20516 - RNA, 19 nt, Artificial Sequence
  Synthetic
ugagcgaacucgguuauaa

SEQ ID NO: 20517 - RNA, 19 nt, Artificial Sequence
  Synthetic
gagcgaacucgguuauaag

SEQ ID NO: 20518 - RNA, 19 nt, Artificial Sequence
  Synthetic
guuggaaccugcaauaaac

SEQ ID NO: 20519 - RNA, 19 nt, Artificial Sequence
  Synthetic
gcucauggcgaagagacuu

SEQ ID NO: 20520 - RNA, 19 nt, Artificial Sequence
  Synthetic
gagagggcagcuacuccaa

SEQ ID NO: 20521 - RNA, 19 nt, Artificial Sequence
  Synthetic
gaagucaugcauuucuuga

SEQ ID NO: 20522 - RNA, 19 nt, Artificial Sequence
  Synthetic
gaccugagcaccaccuacu

SEQ ID NO: 20523 - RNA, 19 nt, Artificial Sequence
  Synthetic
ccagagcucauggcgaaga

SEQ ID NO: 20524 - RNA, 19 nt, Artificial Sequence
  Synthetic
gcuuagacccgagauugga

SEQ ID NO: 20525 - RNA, 19 nt, Artificial Sequence
  Synthetic
gugcacgucuucgaguuca

SEQ ID NO: 20526 - RNA, 19 nt, Artificial Sequence
  Synthetic
uggcuuagacccgagauug

SEQ ID NO: 20527 - RNA, 19 nt, Artificial Sequence
  Synthetic
ccgcuucccucccuuucuu

SEQ ID NO: 20528 - RNA, 19 nt, Artificial Sequence
  Synthetic
ggaagucaugcauuucuug

SEQ ID NO: 20529 - RNA, 19 nt, Artificial Sequence
  Synthetic
guccgcaguugcccuuguu

SEQ ID NO: 20530 - RNA, 19 nt, Artificial Sequence
  Synthetic
aggaggagcuggaggacua

SEQ ID NO: 20531 - RNA, 19 nt, Artificial Sequence
  Synthetic
agaaagaggugaagaacga

SEQ ID NO: 20532 - RNA, 19 nt, Artificial Sequence
  Synthetic
ugaagaaagaggugaagaa

SEQ ID NO: 20533 - RNA, 19 nt, Artificial Sequence
  Synthetic
cgacagcagcggaaggaaa

SEQ ID NO: 20534 - RNA, 19 nt, Artificial Sequence
  Synthetic
gcaagaaggcucuggaaga

SEQ ID NO: 20535 - RNA, 19 nt, Artificial Sequence
  Synthetic
uggagaagauggagcaaga

SEQ ID NO: 20536 - RNA, 19 nt, Artificial Sequence
  Synthetic
ggucaggguccaagaggaa

SEQ ID NO: 20537 - RNA, 19 nt, Artificial Sequence
  Synthetic
agaagaaggaugaggagau

SEQ ID NO: 20538 - RNA, 19 nt, Artificial Sequence
  Synthetic
uuuacaaggccaagaauaa

SEQ ID NO: 20539 - RNA, 19 nt, Artificial Sequence
  Synthetic
ugaagauagcccuggauaa

SEQ ID NO: 20540 - RNA, 19 nt, Artificial Sequence
  Synthetic
aggaaagcaugaagcagaa

SEQ ID NO: 20541 - RNA, 19 nt, Artificial Sequence
  Synthetic
gagaaagucccgcgaauau

SEQ ID NO: 20542 - RNA, 19 nt, Artificial Sequence
  Synthetic
ugaagaacgagguggagaa

SEQ ID NO: 20543 - RNA, 19 nt, Artificial Sequence
  Synthetic
gcgagugccucaugaagaa

SEQ ID NO: 20544 - RNA, 19 nt, Artificial Sequence
  Synthetic
ccaaagucauugaaaccaa

SEQ ID NO: 20545 - RNA, 19 nt, Artificial Sequence
  Synthetic
gcauaaacguuuugaacag

SEQ ID NO: 20546 - RNA, 19 nt, Artificial Sequence
  Synthetic
gggagcagaugcagcgcua

SEQ ID NO: 20547 - RNA, 19 nt, Artificial Sequence
  Synthetic
cugaaggaauggcgggaca

SEQ ID NO: 20548 - RNA, 19 nt, Artificial Sequence
  Synthetic
ugaugaagaaagaggugaa

SEQ ID NO: 20549 - RNA, 19 nt, Artificial Sequence
  Synthetic
aggaugaggagaugagauu

SEQ ID NO: 20550 - RNA, 19 nt, Artificial Sequence
  Synthetic
aggccgaggugauggaaga

SEQ ID NO: 20551 - RNA, 19 nt, Artificial Sequence
  Synthetic
ggaaagagggaggcugaaa

SEQ ID NO: 20552 - RNA, 19 nt, Artificial Sequence
  Synthetic
gcgaagaugagaagaagga

SEQ ID NO: 20553 - RNA, 19 nt, Artificial Sequence
  Synthetic
gugagaagaucaagcaguu

SEQ ID NO: 20554 - RNA, 19 nt, Artificial Sequence
  Synthetic
aagagaaagucccgcgaau

SEQ ID NO: 20555 - RNA, 19 nt, Artificial Sequence
  Synthetic
uagagaaccuggagcguca

SEQ ID NO: 20556 - RNA, 19 nt, Artificial Sequence
  Synthetic
agaaagaagagcaucggaa

SEQ ID NO: 20557 - RNA, 19 nt, Artificial Sequence
  Synthetic
gcaaaugcauaaacguuuu

SEQ ID NO: 20558 - RNA, 19 nt, Artificial Sequence
  Synthetic
ucaaacugaugaagaaaga

SEQ ID NO: 20559 - RNA, 19 nt, Artificial Sequence
  Synthetic
aaaucaacgccaagaagaa

SEQ ID NO: 20560 - RNA, 19 nt, Artificial Sequence
  Synthetic
ggacugacguguagaacaa

SEQ ID NO: 20561 - RNA, 19 nt, Artificial Sequence
  Synthetic
gggccaagcucaucggcaa

SEQ ID NO: 20562 - RNA, 19 nt, Artificial Sequence
  Synthetic
aagaagaaguugcgaagga

SEQ ID NO: 20563 - RNA, 19 nt, Artificial Sequence
  Synthetic
ucaagauccucaagaagaa

SEQ ID NO: 20564 - RNA, 19 nt, Artificial Sequence
  Synthetic
uguauauggugauggagua

SEQ ID NO: 20565 - RNA, 19 nt, Artificial Sequence
  Synthetic
gaagaaggaaauucaacua

SEQ ID NO: 20566 - RNA, 19 nt, Artificial Sequence
  Synthetic
gggaaggcucuuacggcaa

SEQ ID NO: 20567 - RNA, 19 nt, Artificial Sequence
  Synthetic
cagaaaauguauaugguga

SEQ ID NO: 20568 - RNA, 19 nt, Artificial Sequence
  Synthetic
ccgucaagauccucaagaa

SEQ ID NO: 20569 - RNA, 19 nt, Artificial Sequence
  Synthetic
gggacaacaucuacaaguu

SEQ ID NO: 20570 - RNA, 19 nt, Artificial Sequence
  Synthetic
uguuauacaacgaagagaa

SEQ ID NO: 20571 - RNA, 19 nt, Artificial Sequence
  Synthetic
cagaagaggaggccaguca

SEQ ID NO: 20572 - RNA, 19 nt, Artificial Sequence
  Synthetic
ugaaagggaugcuugagua

SEQ ID NO: 20573 - RNA, 19 nt, Artificial Sequence
  Synthetic
acaacgaagagaagcagaa

SEQ ID NO: 20574 - RNA, 19 nt, Artificial Sequence
  Synthetic
ccaacgugaagaaggaaau

SEQ ID NO: 20575 - RNA, 19 nt, Artificial Sequence
  Synthetic
acgaagagaagcagaaaau

SEQ ID NO: 20576 - RNA, 19 nt, Artificial Sequence
  Synthetic
aagaagaagaaguugcgaa

SEQ ID NO: 20577 - RNA, 19 nt, Artificial Sequence
  Synthetic
gagaagggaagucggaaca

SEQ ID NO: 20578 - RNA, 19 nt, Artificial Sequence
  Synthetic
aggccaacgugaagaagga

SEQ ID NO: 20579 - RNA, 19 nt, Artificial Sequence
  Synthetic
gcucuuacggcaaggugaa

SEQ ID NO: 20580 - RNA, 19 nt, Artificial Sequence
  Synthetic
guguguggcaugcaggaaa

SEQ ID NO: 20581 - RNA, 19 nt, Artificial Sequence
  Synthetic
cugaggagguuacggcaca

SEQ ID NO: 20582 - RNA, 19 nt, Artificial Sequence
  Synthetic
gcauguucacggagggcga

SEQ ID NO: 20583 - RNA, 19 nt, Artificial Sequence
  Synthetic
gccaacgugaagaaggaaa

SEQ ID NO: 20584 - RNA, 19 nt, Artificial Sequence
  Synthetic
aaucguuucuguuggaaga

SEQ ID NO: 20585 - RNA, 19 nt, Artificial Sequence
  Synthetic
caacgaagagaagcagaaa

SEQ ID NO: 20586 - RNA, 19 nt, Artificial Sequence
  Synthetic
gggaggccaacgugaagaa

SEQ ID NO: 20587 - RNA, 19 nt, Artificial Sequence
  Synthetic
agaagaagaaguugcgaag

SEQ ID NO: 20588 - RNA, 19 nt, Artificial Sequence
  Synthetic
aaauguauauggugaugga

SEQ ID NO: 20589 - RNA, 19 nt, Artificial Sequence
  Synthetic
gaagagaagcagaaaaugu

SEQ ID NO: 20590 - RNA, 19 nt, Artificial Sequence
  Synthetic
gccagaaggugauggagaa

SEQ ID NO: 20591 - RNA, 19 nt, Artificial Sequence
  Synthetic
ggaguuggcagaugcucua

SEQ ID NO: 20592 - RNA, 19 nt, Artificial Sequence
  Synthetic
ccgcgaagccuguguagca

SEQ ID NO: 20593 - RNA, 19 nt, Artificial Sequence
  Synthetic
ggaaauuugggaaugugua

SEQ ID NO: 20594 - RNA, 19 nt, Artificial Sequence
  Synthetic
uuuccaggcuucucagaua

SEQ ID NO: 20595 - RNA, 19 nt, Artificial Sequence
  Synthetic
agucgcagauagagaagga

SEQ ID NO: 20596 - RNA, 19 nt, Artificial Sequence
  Synthetic
gcauuggagugcucugcua

SEQ ID NO: 20597 - RNA, 19 nt, Artificial Sequence
  Synthetic
ccugagaggaagacaaugu

SEQ ID NO: 20598 - RNA, 19 nt, Artificial Sequence
  Synthetic
uugcagaugcccugaccua

SEQ ID NO: 20599 - RNA, 19 nt, Artificial Sequence
  Synthetic
uagaaaggcugaaggacaa

SEQ ID NO: 20600 - RNA, 19 nt, Artificial Sequence
  Synthetic
ggaccuaguggaaggguua

SEQ ID NO: 20601 - RNA, 19 nt, Artificial Sequence
  Synthetic
aagggaaacugguggauau

SEQ ID NO: 20602 - RNA, 19 nt, Artificial Sequence
  Synthetic
ccacaaagccccaggcauu

SEQ ID NO: 20603 - RNA, 19 nt, Artificial Sequence
  Synthetic
auagaaaggcugaaggaca

SEQ ID NO: 20604 - RNA, 19 nt, Artificial Sequence
  Synthetic
caaauugggagcaggagaa

SEQ ID NO: 20605 - RNA, 19 nt, Artificial Sequence
  Synthetic
ccauucaugccaaggguua

SEQ ID NO: 20606 - RNA, 19 nt, Artificial Sequence
  Synthetic
gagaauguguaacaagaau

SEQ ID NO: 20607 - RNA, 19 nt, Artificial Sequence
  Synthetic
ggaaugagauagaaaggcu

SEQ ID NO: 20608 - RNA, 19 nt, Artificial Sequence
  Synthetic
cuguggaaugagauagaaa

SEQ ID NO: 20609 - RNA, 19 nt, Artificial Sequence
  Synthetic
ggagaauguguaacaagaa

SEQ ID NO: 20610 - RNA, 19 nt, Artificial Sequence
  Synthetic
gugcagagucacuguguca

SEQ ID NO: 20611 - RNA, 19 nt, Artificial Sequence
  Synthetic
ggcugaaggacaaaggcaa

SEQ ID NO: 20612 - RNA, 19 nt, Artificial Sequence
  Synthetic
aggagaauguguaacaaga

SEQ ID NO: 20613 - RNA, 19 nt, Artificial Sequence
  Synthetic
gaagcagguugguguaaaa

SEQ ID NO: 20614 - RNA, 19 nt, Artificial Sequence
  Synthetic
cauacuacccaaauugaaa

SEQ ID NO: 20615 - RNA, 19 nt, Artificial Sequence
  Synthetic
ggaagcagguugguguaaa

SEQ ID NO: 20616 - RNA, 19 nt, Artificial Sequence
  Synthetic
ggacuuggguuccaugaau

SEQ ID NO: 20617 - RNA, 19 nt, Artificial Sequence
  Synthetic
gguuaugcccacagagacu

SEQ ID NO: 20618 - RNA, 19 nt, Artificial Sequence
  Synthetic
agaggaugacugagacauu

SEQ ID NO: 20619 - RNA, 19 nt, Artificial Sequence
  Synthetic
ggaaacugguggauaugga

SEQ ID NO: 20620 - RNA, 19 nt, Artificial Sequence
  Synthetic
ggagcaggagaauguguaa

SEQ ID NO: 20621 - RNA, 19 nt, Artificial Sequence
  Synthetic
agauagaaaggcugaagga

SEQ ID NO: 20622 - RNA, 19 nt, Artificial Sequence
  Synthetic
ccaacauacuacccaaauu

SEQ ID NO: 20623 - RNA, 19 nt, Artificial Sequence
  Synthetic
gaagaggaugacugagaca

SEQ ID NO: 20624 - RNA, 19 nt, Artificial Sequence
  Synthetic
uugaagaggaugacugaga

SEQ ID NO: 20625 - RNA, 19 nt, Artificial Sequence
  Synthetic
cuauguggaccuaguggaa

SEQ ID NO: 20626 - RNA, 19 nt, Artificial Sequence
  Synthetic
cagcgcaucuccuggaaga

SEQ ID NO: 20627 - RNA, 19 nt, Artificial Sequence
  Synthetic
gaggaugacugagacauua

SEQ ID NO: 20628 - RNA, 19 nt, Artificial Sequence
  Synthetic
cuccugaacucgaugauga

SEQ ID NO: 20629 - RNA, 19 nt, Artificial Sequence
  Synthetic
cugcaaaguucaugagaaa

SEQ ID NO: 20630 - RNA, 19 nt, Artificial Sequence
  Synthetic
gaagaagccuuuaaagaaa

SEQ ID NO: 20631 - RNA, 19 nt, Artificial Sequence
  Synthetic
cuguaaaucucuugcauua

SEQ ID NO: 20632 - RNA, 19 nt, Artificial Sequence
  Synthetic
acaagaaauuccaggagaa

SEQ ID NO: 20633 - RNA, 19 nt, Artificial Sequence
  Synthetic
gagcagagagagagagaga

SEQ ID NO: 20634 - RNA, 19 nt, Artificial Sequence
  Synthetic
ggaaaaggcacuagaagaa

SEQ ID NO: 20635 - RNA, 19 nt, Artificial Sequence
  Synthetic
gcagagagagagagagaga

SEQ ID NO: 20636 - RNA, 19 nt, Artificial Sequence
  Synthetic
gaauuuaucuacugagcaa

SEQ ID NO: 20637 - RNA, 19 nt, Artificial Sequence
  Synthetic
ugucaugcuuacaggaaua

SEQ ID NO: 20638 - RNA, 19 nt, Artificial Sequence
  Synthetic
gagaagaagccuuuaaaga

SEQ ID NO: 20639 - RNA, 19 nt, Artificial Sequence
  Synthetic
aagagaaaauggagcaaaa

SEQ ID NO: 20640 - RNA, 19 nt, Artificial Sequence
  Synthetic
caagauugucggauggaaa

SEQ ID NO: 20641 - RNA, 19 nt, Artificial Sequence
  Synthetic
agaagaagccuuuaaagaa

SEQ ID NO: 20642 - RNA, 19 nt, Artificial Sequence
  Synthetic
aggcaaugauaaacaagaa

SEQ ID NO: 20643 - RNA, 19 nt, Artificial Sequence
  Synthetic
ugaucuuaguucuggaaua

SEQ ID NO: 20644 - RNA, 19 nt, Artificial Sequence
  Synthetic
ugucaaauuuguggaguua

SEQ ID NO: 20645 - RNA, 19 nt, Artificial Sequence
  Synthetic
ccaguaaaguccaauuaaa

SEQ ID NO: 20646 - RNA, 19 nt, Artificial Sequence
  Synthetic
gcauuggaguguuaacaua

SEQ ID NO: 20647 - RNA, 19 nt, Artificial Sequence
  Synthetic
agugaagagcuccgagaaa

SEQ ID NO: 20648 - RNA, 19 nt, Artificial Sequence
  Synthetic
cugaaauuauucuggguuu

SEQ ID NO: 20649 - RNA, 19 nt, Artificial Sequence
  Synthetic
guggagcauuggaguguua

SEQ ID NO: 20650 - RNA, 19 nt, Artificial Sequence
  Synthetic
ccugaaauuaauucggaua

SEQ ID NO: 20651 - RNA, 19 nt, Artificial Sequence
  Synthetic
aauuugcaguggugagaaa

SEQ ID NO: 20652 - RNA, 19 nt, Artificial Sequence
  Synthetic
gccgaauaccuuaaaguaa

SEQ ID NO: 20653 - RNA, 19 nt, Artificial Sequence
  Synthetic
gauuugaagccucagaaua

SEQ ID NO: 20654 - RNA, 19 nt, Artificial Sequence
  Synthetic
gcugcaaaguucaugagaa

SEQ ID NO: 20655 - RNA, 19 nt, Artificial Sequence
  Synthetic
ugaacuagcacaagacaau

SEQ ID NO: 20656 - RNA, 19 nt, Artificial Sequence
  Synthetic
gugaaaagaugcuacuaua

SEQ ID NO: 20657 - RNA, 19 nt, Artificial Sequence
  Synthetic
uaagagaggugguaauuuu

SEQ ID NO: 20658 - RNA, 19 nt, Artificial Sequence
  Synthetic
ugaagagcuccgagaaauu

SEQ ID NO: 20659 - RNA, 19 nt, Artificial Sequence
  Synthetic
gagaagacaaagagaauau

SEQ ID NO: 20660 - RNA, 19 nt, Artificial Sequence
  Synthetic
gcaacagauauguggaaua

SEQ ID NO: 20661 - RNA, 19 nt, Artificial Sequence
  Synthetic
gggaaguguuuuaauguua

SEQ ID NO: 20662 - RNA, 19 nt, Artificial Sequence
  Synthetic
gggagaagauaaucaagaa

SEQ ID NO: 20663 - RNA, 19 nt, Artificial Sequence
  Synthetic
acaaauacuugaaggaguu

SEQ ID NO: 20664 - RNA, 19 nt, Artificial Sequence
  Synthetic
gagaagaagaggacaggau

SEQ ID NO: 20665 - RNA, 19 nt, Artificial Sequence
  Synthetic
ggagaagauaaucaagaaa

SEQ ID NO: 20666 - RNA, 19 nt, Artificial Sequence
  Synthetic
ccgaaguauuucaggccua

SEQ ID NO: 20667 - RNA, 19 nt, Artificial Sequence
  Synthetic
uagagaagacaaagagaau

SEQ ID NO: 20668 - RNA, 19 nt, Artificial Sequence
  Synthetic
auucagagccuuuuaguaa

SEQ ID NO: 20669 - RNA, 19 nt, Artificial Sequence
  Synthetic
gauuuaaagccacagaaua

SEQ ID NO: 20670 - RNA, 19 nt, Artificial Sequence
  Synthetic
agagcuagggagagguaaa

SEQ ID NO: 20671 - RNA, 19 nt, Artificial Sequence
  Synthetic
acuuacaucuaaagagcua

SEQ ID NO: 20672 - RNA, 19 nt, Artificial Sequence
  Synthetic
ccaagaauaugcugcaaaa

SEQ ID NO: 20673 - RNA, 19 nt, Artificial Sequence
  Synthetic
cuccagaaauccugaacua

SEQ ID NO: 20674 - RNA, 19 nt, Artificial Sequence
  Synthetic
ggaauaugcugcaggugga

SEQ ID NO: 20675 - RNA, 19 nt, Artificial Sequence
  Synthetic
ugagauagcucugcagaua

SEQ ID NO: 20676 - RNA, 19 nt, Artificial Sequence
  Synthetic
gaggauagcagcaugguuu

SEQ ID NO: 20677 - RNA, 19 nt, Artificial Sequence
  Synthetic
gcgugugaacuucgggaaa

SEQ ID NO: 20678 - RNA, 19 nt, Artificial Sequence
  Synthetic
gggaacaccagaauauuua

SEQ ID NO: 20679 - RNA, 19 nt, Artificial Sequence
  Synthetic
guagauuauucggaagaaa

SEQ ID NO: 20680 - RNA, 19 nt, Artificial Sequence
  Synthetic
caagaaacauaccucaaua

SEQ ID NO: 20681 - RNA, 19 nt, Artificial Sequence
  Synthetic
cauuguacaccuugauuua

SEQ ID NO: 20682 - RNA, 19 nt, Artificial Sequence
  Synthetic
aagaccaacagcagagaua

SEQ ID NO: 20683 - RNA, 19 nt, Artificial Sequence
  Synthetic
uggugauagagaagacaaa

SEQ ID NO: 20684 - RNA, 19 nt, Artificial Sequence
  Synthetic
cagcaacagauauguggaa

SEQ ID NO: 20685 - RNA, 19 nt, Artificial Sequence
  Synthetic
cagaaauccugaacuauga

SEQ ID NO: 20686 - RNA, 19 nt, Artificial Sequence
  Synthetic
caugggaacaccagaauau

SEQ ID NO: 20687 - RNA, 19 nt, Artificial Sequence
  Synthetic
auagagaagacaaagagaa

SEQ ID NO: 20688 - RNA, 19 nt, Artificial Sequence
  Synthetic
gugauagagaagacaaaga

SEQ ID NO: 20689 - RNA, 19 nt, Artificial Sequence
  Synthetic
gggagaagaucgaggauuu

SEQ ID NO: 20690 - RNA, 19 nt, Artificial Sequence
  Synthetic
caguauaagugguaguuua

SEQ ID NO: 20691 - RNA, 19 nt, Artificial Sequence
  Synthetic
guacaaagcaggaauggua

SEQ ID NO: 20692 - RNA, 19 nt, Artificial Sequence
  Synthetic
gaacagguaucuaaagaau

SEQ ID NO: 20693 - RNA, 19 nt, Artificial Sequence
  Synthetic
guggaagacucaauugaua

SEQ ID NO: 20694 - RNA, 19 nt, Artificial Sequence
  Synthetic
ccaaauggucaaacaacua

SEQ ID NO: 20695 - RNA, 19 nt, Artificial Sequence
  Synthetic
gaaaugaacagguaucuaa

SEQ ID NO: 20696 - RNA, 19 nt, Artificial Sequence
  Synthetic
ugaaagaccugauaacaau

SEQ ID NO: 20697 - RNA, 19 nt, Artificial Sequence
  Synthetic
gaaugaaacuugagucacu

SEQ ID NO: 20698 - RNA, 19 nt, Artificial Sequence
  Synthetic
ccaguuacuucguagaaau

SEQ ID NO: 20699 - RNA, 19 nt, Artificial Sequence
  Synthetic
cuuaaucccucuaugguua

SEQ ID NO: 20700 - RNA, 19 nt, Artificial Sequence
  Synthetic
ggaccuuauucaccaguua

SEQ ID NO: 20701 - RNA, 19 nt, Artificial Sequence
  Synthetic
ggacuuggucuuacaacua

SEQ ID NO: 20702 - RNA, 19 nt, Artificial Sequence
  Synthetic
aaauagaacaccugacuuu

SEQ ID NO: 20703 - RNA, 19 nt, Artificial Sequence
  Synthetic
gaaauaggaaggugggauu

SEQ ID NO: 20704 - RNA, 19 nt, Artificial Sequence
  Synthetic
cgaaggagguugacaccaa

SEQ ID NO: 20705 - RNA, 19 nt, Artificial Sequence
  Synthetic
ccggagaccuuuggaguua

SEQ ID NO: 20706 - RNA, 19 nt, Artificial Sequence
  Synthetic
cgggauaugagcuggaaga

SEQ ID NO: 20707 - RNA, 19 nt, Artificial Sequence
  Synthetic
ggaaaguggaaccagaaau

SEQ ID NO: 20708 - RNA, 19 nt, Artificial Sequence
  Synthetic
ggagauucaucaaguacuu

SEQ ID NO: 20709 - RNA, 19 nt, Artificial Sequence
  Synthetic
augcaaucauucagcgaca

SEQ ID NO: 20710 - RNA, 19 nt, Artificial Sequence
  Synthetic
ccagagacaugaagauucu

SEQ ID NO: 20711 - RNA, 19 nt, Artificial Sequence
  Synthetic
gcaugguccggaaggcaaa

SEQ ID NO: 20712 - RNA, 19 nt, Artificial Sequence
  Synthetic
gacuacaggaccagaguau

SEQ ID NO: 20713 - RNA, 19 nt, Artificial Sequence
  Synthetic
cuacaggaccagaguaugu

SEQ ID NO: 20714 - RNA, 19 nt, Artificial Sequence
  Synthetic
cuuggaugcccauggaauu

SEQ ID NO: 20715 - RNA, 19 nt, Artificial Sequence
  Synthetic
gacuagaagagcugcauga

SEQ ID NO: 20716 - RNA, 19 nt, Artificial Sequence
  Synthetic
cagaucaagaauccaguua

SEQ ID NO: 20717 - RNA, 19 nt, Artificial Sequence
  Synthetic
acugaggacuacaggacca

SEQ ID NO: 20718 - RNA, 19 nt, Artificial Sequence
  Synthetic
ccucaaagcuccccaacuu

SEQ ID NO: 20719 - RNA, 19 nt, Artificial Sequence
  Synthetic
acucagaaaucacgcaucu

SEQ ID NO: 20720 - RNA, 19 nt, Artificial Sequence
  Synthetic
auuucuagcuucaguacuu

SEQ ID NO: 20721 - RNA, 19 nt, Artificial Sequence
  Synthetic
gggaacugcuccuaucaga

SEQ ID NO: 20722 - RNA, 19 nt, Artificial Sequence
  Synthetic
gaaaguggaaccagaaaug

SEQ ID NO: 20723 - RNA, 19 nt, Artificial Sequence
  Synthetic
gaccagaguaugugacugu

SEQ ID NO: 20724 - RNA, 19 nt, Artificial Sequence
  Synthetic
cuucagggacucagaaauc

SEQ ID NO: 20725 - RNA, 19 nt, Artificial Sequence
  Synthetic
gcuguucccuuucguguaa

SEQ ID NO: 20726 - RNA, 19 nt, Artificial Sequence
  Synthetic
cugggagauucaucaagua

SEQ ID NO: 20727 - RNA, 19 nt, Artificial Sequence
  Synthetic
gcagugagguuaggaagga

SEQ ID NO: 20728 - RNA, 19 nt, Artificial Sequence
  Synthetic
acacagaccuuuggcuuca

SEQ ID NO: 20729 - RNA, 19 nt, Artificial Sequence
  Synthetic
ccaaaugcagugagguuag

SEQ ID NO: 20730 - RNA, 19 nt, Artificial Sequence
  Synthetic
guuauuacucugucuugaa

SEQ ID NO: 20731 - RNA, 19 nt, Artificial Sequence
  Synthetic
agaugugacugcugcuguu

SEQ ID NO: 20732 - RNA, 19 nt, Artificial Sequence
  Synthetic
ggacuacaggaccagagua

SEQ ID NO: 20733 - RNA, 19 nt, Artificial Sequence
  Synthetic
gcagguaggaucugaagaa

SEQ ID NO: 20734 - RNA, 19 nt, Artificial Sequence
  Synthetic
gcuccaucaucaagacuua

SEQ ID NO: 20735 - RNA, 19 nt, Artificial Sequence
  Synthetic
cugacuuuguggagagauu

SEQ ID NO: 20736 - RNA, 19 nt, Artificial Sequence
  Synthetic
gaucaucgaccgcaagaaa

SEQ ID NO: 20737 - RNA, 19 nt, Artificial Sequence
  Synthetic
caucaagacuuacgagauc

SEQ ID NO: 20738 - RNA, 19 nt, Artificial Sequence
  Synthetic
agugcaaacuggacaccaa

SEQ ID NO: 20739 - RNA, 19 nt, Artificial Sequence
  Synthetic
ucaggaagaugcugcguau

SEQ ID NO: 20740 - RNA, 19 nt, Artificial Sequence
  Synthetic
ggacggaucuacaucauca

SEQ ID NO: 20741 - RNA, 19 nt, Artificial Sequence
  Synthetic
gaaaacaccuacugacuuu

SEQ ID NO: 20742 - RNA, 19 nt, Artificial Sequence
  Synthetic
ggcaaggguuccuacgcaa

SEQ ID NO: 20743 - RNA, 19 nt, Artificial Sequence
  Synthetic
aagcaagcaccuagcauga

SEQ ID NO: 20744 - RNA, 19 nt, Artificial Sequence
  Synthetic
gcaaggguuccuacgcaaa

SEQ ID NO: 20745 - RNA, 19 nt, Artificial Sequence
  Synthetic
gaagaaggguuacaucgua

SEQ ID NO: 20746 - RNA, 19 nt, Artificial Sequence
  Synthetic
ccuaccagcccaaggugua

SEQ ID NO: 20747 - RNA, 19 nt, Artificial Sequence
  Synthetic
ccgagaacgagaacaggau

SEQ ID NO: 20748 - RNA, 19 nt, Artificial Sequence
  Synthetic
gacaaggacuucaacauca

SEQ ID NO: 20749 - RNA, 19 nt, Artificial Sequence
  Synthetic
agaacaggauggaggacag

SEQ ID NO: 20750 - RNA, 19 nt, Artificial Sequence
  Synthetic
uaaacuaaguaggcaggua

SEQ ID NO: 20751 - RNA, 19 nt, Artificial Sequence
  Synthetic
cagucggccuucacguaaa

SEQ ID NO: 20752 - RNA, 19 nt, Artificial Sequence
  Synthetic
acaucaagcugucugacuu

SEQ ID NO: 20753 - RNA, 19 nt, Artificial Sequence
  Synthetic
caucaagcugucugacuuu

SEQ ID NO: 20754 - RNA, 19 nt, Artificial Sequence
  Synthetic
ggaagaaggguuacaucgu

SEQ ID NO: 20755 - RNA, 19 nt, Artificial Sequence
  Synthetic
gcaagcaccuagcaugaca

SEQ ID NO: 20756 - RNA, 19 nt, Artificial Sequence
  Synthetic
ggaucuacaucaucaugga

SEQ ID NO: 20757 - RNA, 19 nt, Artificial Sequence
  Synthetic
cgacaaggacuucaacauc

SEQ ID NO: 20758 - RNA, 19 nt, Artificial Sequence
  Synthetic
ucaauguggcugucaagau

SEQ ID NO: 20759 - RNA, 19 nt, Artificial Sequence
  Synthetic
caaacuggacaccaagaca

SEQ ID NO: 20760 - RNA, 19 nt, Artificial Sequence
  Synthetic
caucguaggcaucaaucuu

SEQ ID NO: 20761 - RNA, 19 nt, Artificial Sequence
  Synthetic
gggcaagaccauuggggaa

SEQ ID NO: 20762 - RNA, 19 nt, Artificial Sequence
  Synthetic
caaagaagcauuuuccaaa

SEQ ID NO: 20763 - RNA, 19 nt, Artificial Sequence
  Synthetic
gcugagagggugauaggaa

SEQ ID NO: 20764 - RNA, 19 nt, Artificial Sequence
  Synthetic
gggaagggaccuacucaaa

SEQ ID NO: 20765 - RNA, 19 nt, Artificial Sequence
  Synthetic
ugaagaaguuaguuggcau

SEQ ID NO: 20766 - RNA, 19 nt, Artificial Sequence
  Synthetic
ggcaagugcucuccaauaa

SEQ ID NO: 20767 - RNA, 19 nt, Artificial Sequence
  Synthetic
agacaagaugggagggcca

SEQ ID NO: 20768 - RNA, 19 nt, Artificial Sequence
  Synthetic
gggagggccagaagaguuu

SEQ ID NO: 20769 - RNA, 19 nt, Artificial Sequence
  Synthetic
aagaguuuauccagagauu

SEQ ID NO: 20770 - RNA, 19 nt, Artificial Sequence
  Synthetic
ccagaagaguuuauccaga

SEQ ID NO: 20771 - RNA, 19 nt, Artificial Sequence
  Synthetic
agaacaucauccaggugua

SEQ ID NO: 20772 - RNA, 19 nt, Artificial Sequence
  Synthetic
uugccaagguguugcccaa

SEQ ID NO: 20773 - RNA, 19 nt, Artificial Sequence
  Synthetic
gggaaaaucugccugguga

SEQ ID NO: 20774 - RNA, 19 nt, Artificial Sequence
  Synthetic
caagggcgaugguggagua

SEQ ID NO: 20775 - RNA, 19 nt, Artificial Sequence
  Synthetic
uggcaagugcucuccaaua

SEQ ID NO: 20776 - RNA, 19 nt, Artificial Sequence
  Synthetic
uagacagcauggaggacuu

SEQ ID NO: 20777 - RNA, 19 nt, Artificial Sequence
  Synthetic
acgccuuguugcagggcuu

SEQ ID NO: 20778 - RNA, 19 nt, Artificial Sequence
  Synthetic
gcucaagaggcuccuggaa

SEQ ID NO: 20779 - RNA, 19 nt, Artificial Sequence
  Synthetic
gcaagugcucuccaauaaa

SEQ ID NO: 20780 - RNA, 19 nt, Artificial Sequence
  Synthetic
gggcgaugguggaguagag

SEQ ID NO: 20781 - RNA, 19 nt, Artificial Sequence
  Synthetic
agaagaguuuauccagaga

SEQ ID NO: 20782 - RNA, 19 nt, Artificial Sequence
  Synthetic
uggcauccauggcuagcaa

SEQ ID NO: 20783 - RNA, 19 nt, Artificial Sequence
  Synthetic
caauugaagaaguuaguug

SEQ ID NO: 20784 - RNA, 19 nt, Artificial Sequence
  Synthetic
gcaugggugugguccugua

SEQ ID NO: 20785 - RNA, 19 nt, Artificial Sequence
  Synthetic
gcugacugacuuuggcuuu

SEQ ID NO: 20786 - RNA, 19 nt, Artificial Sequence
  Synthetic
aaaucugccuggugaugga

SEQ ID NO: 20787 - RNA, 19 nt, Artificial Sequence
  Synthetic
gaacaucauccagguguau

SEQ ID NO: 20788 - RNA, 19 nt, Artificial Sequence
  Synthetic
gaaguuaguuggcauccau

SEQ ID NO: 20789 - RNA, 19 nt, Artificial Sequence
  Synthetic
ggaagggaccuacucaaaa

SEQ ID NO: 20790 - RNA, 19 nt, Artificial Sequence
  Synthetic
caaagaaaaguggcaauua

SEQ ID NO: 20791 - RNA, 19 nt, Artificial Sequence
  Synthetic
ggaaagacaagaagaaaua

SEQ ID NO: 20792 - RNA, 19 nt, Artificial Sequence
  Synthetic
ggaggaaagacaagaagaa

SEQ ID NO: 20793 - RNA, 19 nt, Artificial Sequence
  Synthetic
gcuuuaaagugcuagaaau

SEQ ID NO: 20794 - RNA, 19 nt, Artificial Sequence
  Synthetic
ccaccaagcuggagccuga

SEQ ID NO: 20795 - RNA, 19 nt, Artificial Sequence
  Synthetic
ggaugaggccaaagucaaa

SEQ ID NO: 20796 - RNA, 19 nt, Artificial Sequence
  Synthetic
ucaagaagaugcugcguau

SEQ ID NO: 20797 - RNA, 19 nt, Artificial Sequence
  Synthetic
agauggagcucacggcuua

SEQ ID NO: 20798 - RNA, 19 nt, Artificial Sequence
  Synthetic
ggguggagccagagaagga

SEQ ID NO: 20799 - RNA, 19 nt, Artificial Sequence
  Synthetic
agucggagauccuggguuu

SEQ ID NO: 20800 - RNA, 19 nt, Artificial Sequence
  Synthetic
gaggaaagacaagaagaaa

SEQ ID NO: 20801 - RNA, 19 nt, Artificial Sequence
  Synthetic
ggacgaagcucgcaagaag

SEQ ID NO: 20802 - RNA, 19 nt, Artificial Sequence
  Synthetic
gaaaaugggaggaaagaca

SEQ ID NO: 20803 - RNA, 19 nt, Artificial Sequence
  Synthetic
cagaggugcugcagggcau

SEQ ID NO: 20804 - RNA, 19 nt, Artificial Sequence
  Synthetic
gcuccaucauuaagaccua

SEQ ID NO: 20805 - RNA, 19 nt, Artificial Sequence
  Synthetic
cuacgagaucuuugagaca

SEQ ID NO: 20806 - RNA, 19 nt, Artificial Sequence
  Synthetic
aguucaauguggcgaucaa

SEQ ID NO: 20807 - RNA, 19 nt, Artificial Sequence
  Synthetic
gggcaagauccauaaacuu

SEQ ID NO: 20808 - RNA, 19 nt, Artificial Sequence
  Synthetic
uagcauggcaacuggagaa

SEQ ID NO: 20809 - RNA, 19 nt, Artificial Sequence
  Synthetic
acuccaacaucaagaagau

SEQ ID NO: 20810 - RNA, 19 nt, Artificial Sequence
  Synthetic
augcaaauguccaggcagu

SEQ ID NO: 20811 - RNA, 19 nt, Artificial Sequence
  Synthetic
gggaggaaagacaagaaga

SEQ ID NO: 20812 - RNA, 19 nt, Artificial Sequence
  Synthetic
ccagcaagccgucgacuau

SEQ ID NO: 20813 - RNA, 19 nt, Artificial Sequence
  Synthetic
acaaggacuucaacaucaa

SEQ ID NO: 20814 - RNA, 19 nt, Artificial Sequence
  Synthetic
gggcgaccuccucgaguua

SEQ ID NO: 20815 - RNA, 19 nt, Artificial Sequence
  Synthetic
agcuggagccugagggaga

SEQ ID NO: 20816 - RNA, 19 nt, Artificial Sequence
  Synthetic
gacuauggagacagaggaa

SEQ ID NO: 20817 - RNA, 19 nt, Artificial Sequence
  Synthetic
ggcaagauccauaaacuuu

SEQ ID NO: 20818 - RNA, 19 nt, Artificial Sequence
  Synthetic
ucaagaucaucgaccgcaa

SEQ ID NO: 20819 - RNA, 19 nt, Artificial Sequence
  Synthetic
aaauugagauucuggccau

SEQ ID NO: 20820 - RNA, 19 nt, Artificial Sequence
  Synthetic
aaagaagccucaaaacaua

SEQ ID NO: 20821 - RNA, 19 nt, Artificial Sequence
  Synthetic
acaucaagcccgagaacau

SEQ ID NO: 20822 - RNA, 19 nt, Artificial Sequence
  Synthetic
ggaagaagaugaggcgcaa

SEQ ID NO: 20823 - RNA, 19 nt, Artificial Sequence
  Synthetic
ccucgaaccuccuggugaa

SEQ ID NO: 20824 - RNA, 19 nt, Artificial Sequence
  Synthetic
gcuccgacgacgaggaaca

SEQ ID NO: 20825 - RNA, 19 nt, Artificial Sequence
  Synthetic
aggaagaagaugaggcgca

SEQ ID NO: 20826 - RNA, 19 nt, Artificial Sequence
  Synthetic
cagcuguggaugagaucaa

SEQ ID NO: 20827 - RNA, 19 nt, Artificial Sequence
  Synthetic
cggagacagcuguggauga

SEQ ID NO: 20828 - RNA, 19 nt, Artificial Sequence
  Synthetic
gaugaggcgcaaacggaaa

SEQ ID NO: 20829 - RNA, 19 nt, Artificial Sequence
  Synthetic
agaucaagcuccugaaaug

SEQ ID NO: 20830 - RNA, 19 nt, Artificial Sequence
  Synthetic
gcaaacggaaacagcagaa

SEQ ID NO: 20831 - RNA, 19 nt, Artificial Sequence
  Synthetic
acgacgaggaacaggaaga

SEQ ID NO: 20832 - RNA, 19 nt, Artificial Sequence
  Synthetic
acgagguacucauggaaaa

SEQ ID NO: 20833 - RNA, 19 nt, Artificial Sequence
  Synthetic
cuccgugccuuaagggaaa

SEQ ID NO: 20834 - RNA, 19 nt, Artificial Sequence
  Synthetic
ggagaaaguguguguauuc

SEQ ID NO: 20835 - RNA, 19 nt, Artificial Sequence
  Synthetic
aacaagaggaagaagauga

SEQ ID NO: 20836 - RNA, 19 nt, Artificial Sequence
  Synthetic
ugaagagcaucgugaggca

SEQ ID NO: 20837 - RNA, 19 nt, Artificial Sequence
  Synthetic
aggaagaccccaaagacua

SEQ ID NO: 20838 - RNA, 19 nt, Artificial Sequence
  Synthetic
gcacaagcacuucacggaa

SEQ ID NO: 20839 - RNA, 19 nt, Artificial Sequence
  Synthetic
cggagaaaguguguguauu

SEQ ID NO: 20840 - RNA, 19 nt, Artificial Sequence
  Synthetic
ucggagaaaguguguguau

SEQ ID NO: 20841 - RNA, 19 nt, Artificial Sequence
  Synthetic
ggaaacagcagaagcggcu

SEQ ID NO: 20842 - RNA, 19 nt, Artificial Sequence
  Synthetic
acaccaagugcaagaucau

SEQ ID NO: 20843 - RNA, 19 nt, Artificial Sequence
  Synthetic
caaccacagggcagagaga

SEQ ID NO: 20844 - RNA, 19 nt, Artificial Sequence
  Synthetic
gcuaccacccugugaagau

SEQ ID NO: 20845 - RNA, 19 nt, Artificial Sequence
  Synthetic
ggaccacaucgcucacaua

SEQ ID NO: 20846 - RNA, 19 nt, Artificial Sequence
  Synthetic
agacagcuguggaugagau

SEQ ID NO: 20847 - RNA, 19 nt, Artificial Sequence
  Synthetic
gaggagagcugcggcacau

SEQ ID NO: 20848 - RNA, 19 nt, Artificial Sequence
  Synthetic
uuaauaaaguguggacuga

SEQ ID NO: 20849 - RNA, 19 nt, Artificial Sequence
  Synthetic
cgacgacgaggaacaggaa

SEQ ID NO: 20850 - RNA, 19 nt, Artificial Sequence
  Synthetic
gaagaagaugaggcgcaaa

SEQ ID NO: 20851 - RNA, 19 nt, Artificial Sequence
  Synthetic
gggagaaacuggagcaugu

SEQ ID NO: 20852 - RNA, 19 nt, Artificial Sequence
  Synthetic
gcacgaaccuaaaggcaga

SEQ ID NO: 20853 - RNA, 19 nt, Artificial Sequence
  Synthetic
caucggacuuggacagaaa

SEQ ID NO: 20854 - RNA, 19 nt, Artificial Sequence
  Synthetic
uugcagaguugaaggagaa

SEQ ID NO: 20855 - RNA, 19 nt, Artificial Sequence
  Synthetic
agaaagugguugccauaaa

SEQ ID NO: 20856 - RNA, 19 nt, Artificial Sequence
  Synthetic
cauaacagcuauugaacuu

SEQ ID NO: 20857 - RNA, 19 nt, Artificial Sequence
  Synthetic
ggacagaaauaagaugaaa

SEQ ID NO: 20858 - RNA, 19 nt, Artificial Sequence
  Synthetic
uggaagaagcugaagauga

SEQ ID NO: 20859 - RNA, 19 nt, Artificial Sequence
  Synthetic
gagaaauacugaaaggacu

SEQ ID NO: 20860 - RNA, 19 nt, Artificial Sequence
  Synthetic
aagaugagauagaggacau

SEQ ID NO: 20861 - RNA, 19 nt, Artificial Sequence
  Synthetic
aaacaaacccugaaaugua

SEQ ID NO: 20862 - RNA, 19 nt, Artificial Sequence
  Synthetic
aauaaggagccgagcuuua

SEQ ID NO: 20863 - RNA, 19 nt, Artificial Sequence
  Synthetic
cugaaugcuuacacaaaua

SEQ ID NO: 20864 - RNA, 19 nt, Artificial Sequence
  Synthetic
ugacagacacccagaucaa

SEQ ID NO: 20865 - RNA, 19 nt, Artificial Sequence
  Synthetic
uggaaggaaacuacaguaa

SEQ ID NO: 20866 - RNA, 19 nt, Artificial Sequence
  Synthetic
guggauggguguacagauu

SEQ ID NO: 20867 - RNA, 19 nt, Artificial Sequence
  Synthetic
gccauaaacuugagucuau

SEQ ID NO: 20868 - RNA, 19 nt, Artificial Sequence
  Synthetic
ggaaggaaacuacaguaaa

SEQ ID NO: 20869 - RNA, 19 nt, Artificial Sequence
  Synthetic
gaugaaacccagaucgcua

SEQ ID NO: 20870 - RNA, 19 nt, Artificial Sequence
  Synthetic
ucuaagugguggaggaacu

SEQ ID NO: 20871 - RNA, 19 nt, Artificial Sequence
  Synthetic
ggagggagcacgaaccuaa

SEQ ID NO: 20872 - RNA, 19 nt, Artificial Sequence
  Synthetic
ucagaaagugguugccaua

SEQ ID NO: 20873 - RNA, 19 nt, Artificial Sequence
  Synthetic
guggaggccuguuugaaua

SEQ ID NO: 20874 - RNA, 19 nt, Artificial Sequence
  Synthetic
gggcauaacagcuauugaa

SEQ ID NO: 20875 - RNA, 19 nt, Artificial Sequence
  Synthetic
aggugaagcuggcggacuu

SEQ ID NO: 20876 - RNA, 19 nt, Artificial Sequence
  Synthetic
ggaagaagcugaagaugag

SEQ ID NO: 20877 - RNA, 19 nt, Artificial Sequence
  Synthetic
aagcugaagaugagauaga

SEQ ID NO: 20878 - RNA, 19 nt, Artificial Sequence
  Synthetic
aggaguuauugaagcacaa

SEQ ID NO: 20879 - RNA, 19 nt, Artificial Sequence
  Synthetic
gagccgagcuuuagaccca

SEQ ID NO: 20880 - RNA, 19 nt, Artificial Sequence
  Synthetic
guccauauguaaccaaaua

SEQ ID NO: 20881 - RNA, 19 nt, Artificial Sequence
  Synthetic
agaccaaggcgcagagcaa

SEQ ID NO: 20882 - RNA, 19 nt, Artificial Sequence
  Synthetic
aggaugagaucgaggacau

SEQ ID NO: 20883 - RNA, 19 nt, Artificial Sequence
  Synthetic
gcgcacugcuguucagaua

SEQ ID NO: 20884 - RNA, 19 nt, Artificial Sequence
  Synthetic
ucacagacacgcagauuaa

SEQ ID NO: 20885 - RNA, 19 nt, Artificial Sequence
  Synthetic
caaaggaggugguggccau

SEQ ID NO: 20886 - RNA, 19 nt, Artificial Sequence
  Synthetic
gugcagagguuuucacaca

SEQ ID NO: 20887 - RNA, 19 nt, Artificial Sequence
  Synthetic
uggaggaggccgaggauga

SEQ ID NO: 20888 - RNA, 19 nt, Artificial Sequence
  Synthetic
ucggagagcucaaagagaa

SEQ ID NO: 20889 - RNA, 19 nt, Artificial Sequence
  Synthetic
acacgcagauuaagaggaa

SEQ ID NO: 20890 - RNA, 19 nt, Artificial Sequence
  Synthetic
acgcagauuaagaggaaca

SEQ ID NO: 20891 - RNA, 19 nt, Artificial Sequence
  Synthetic
cuaaagagcaccaagcuau

SEQ ID NO: 20892 - RNA, 19 nt, Artificial Sequence
  Synthetic
cugaaauauucugagguua

SEQ ID NO: 20893 - RNA, 19 nt, Artificial Sequence
  Synthetic
ccugaaauauucugagguu

SEQ ID NO: 20894 - RNA, 19 nt, Artificial Sequence
  Synthetic
acgugaagcuggcggacuu

SEQ ID NO: 20895 - RNA, 19 nt, Artificial Sequence
  Synthetic
ccuaaagagcaccaagcua

SEQ ID NO: 20896 - RNA, 19 nt, Artificial Sequence
  Synthetic
cagacaagcugauggugca

SEQ ID NO: 20897 - RNA, 19 nt, Artificial Sequence
  Synthetic
cugaggagcucuucaccaa

SEQ ID NO: 20898 - RNA, 19 nt, Artificial Sequence
  Synthetic
ucaccaagcucgaccgcau

SEQ ID NO: 20899 - RNA, 19 nt, Artificial Sequence
  Synthetic
gcaccaagcuauggaucau

SEQ ID NO: 20900 - RNA, 19 nt, Artificial Sequence
  Synthetic
ucuacaagggcaucgauaa

SEQ ID NO: 20901 - RNA, 19 nt, Artificial Sequence
  Synthetic
cagauuaagaggaacacau

SEQ ID NO: 20902 - RNA, 19 nt, Artificial Sequence
  Synthetic
ccuacgacuucaaggcuga

SEQ ID NO: 20903 - RNA, 19 nt, Artificial Sequence
  Synthetic
gcaucgauaaccacacaaa

SEQ ID NO: 20904 - RNA, 19 nt, Artificial Sequence
  Synthetic
aaagagaagcacaagcaga

SEQ ID NO: 20905 - RNA, 19 nt, Artificial Sequence
  Synthetic
aggccgaggaugagaucga

SEQ ID NO: 20906 - RNA, 19 nt, Artificial Sequence
  Synthetic
gggagauucugaagggccu

SEQ ID NO: 20907 - RNA, 19 nt, Artificial Sequence
  Synthetic
ucaucaagcagucggccua

SEQ ID NO: 20908 - RNA, 19 nt, Artificial Sequence
  Synthetic
cgcuggaggagcuggagaa

SEQ ID NO: 20909 - RNA, 19 nt, Artificial Sequence
  Synthetic
cgcaagauccaccgagaca

SEQ ID NO: 20910 - RNA, 19 nt, Artificial Sequence
  Synthetic
cauaaguacuugugucauc

SEQ ID NO: 20911 - RNA, 19 nt, Artificial Sequence
  Synthetic
cagaaacacauaugguaua

SEQ ID NO: 20912 - RNA, 19 nt, Artificial Sequence
  Synthetic
caacguagccacaggaaca

SEQ ID NO: 20913 - RNA, 19 nt, Artificial Sequence
  Synthetic
ucgacuaccuggugaagaa

SEQ ID NO: 20914 - RNA, 19 nt, Artificial Sequence
  Synthetic
uggagaagacgcugggcaa

SEQ ID NO: 20915 - RNA, 19 nt, Artificial Sequence
  Synthetic
ugaugaagguggagcggga

SEQ ID NO: 20916 - RNA, 19 nt, Artificial Sequence
  Synthetic
uuaaagaauuccugcaaga

SEQ ID NO: 20917 - RNA, 19 nt, Artificial Sequence
  Synthetic
accacuaacuguauggaaa

SEQ ID NO: 20918 - RNA, 19 nt, Artificial Sequence
  Synthetic
gcgaagaaguccugguuug

SEQ ID NO: 20919 - RNA, 19 nt, Artificial Sequence
  Synthetic
ccacuaacuguauggaaau

SEQ ID NO: 20920 - RNA, 19 nt, Artificial Sequence
  Synthetic
aggaggagaaccaggagaa

SEQ ID NO: 20921 - RNA, 19 nt, Artificial Sequence
  Synthetic
aggagaaccaggagaagau

SEQ ID NO: 20922 - RNA, 19 nt, Artificial Sequence
  Synthetic
gcuagagcacauucagaaa

SEQ ID NO: 20923 - RNA, 19 nt, Artificial Sequence
  Synthetic
aagaauuccugcaagauau

SEQ ID NO: 20924 - RNA, 19 nt, Artificial Sequence
  Synthetic
guggugagcucuucgacua

SEQ ID NO: 20925 - RNA, 19 nt, Artificial Sequence
  Synthetic
uggagaaggaggagcagau

SEQ ID NO: 20926 - RNA, 19 nt, Artificial Sequence
  Synthetic
aaagaauuccugcaagaua

SEQ ID NO: 20927 - RNA, 19 nt, Artificial Sequence
  Synthetic
uggcugagguggaaacaga

SEQ ID NO: 20928 - RNA, 19 nt, Artificial Sequence
  Synthetic
ucagaaacacauaugguau

SEQ ID NO: 20929 - RNA, 19 nt, Artificial Sequence
  Synthetic
gcacauucagaaacacaua

SEQ ID NO: 20930 - RNA, 19 nt, Artificial Sequence
  Synthetic
gcgagucggugcugaugaa

SEQ ID NO: 20931 - RNA, 19 nt, Artificial Sequence
  Synthetic
ggccagguuuuguguuuua

SEQ ID NO: 20932 - RNA, 19 nt, Artificial Sequence
  Synthetic
agaaggaggagcagaucuu

SEQ ID NO: 20933 - RNA, 19 nt, Artificial Sequence
  Synthetic
gggaggcgcagaaggagaa

SEQ ID NO: 20934 - RNA, 19 nt, Artificial Sequence
  Synthetic
gcgcagaaggagaacggca

SEQ ID NO: 20935 - RNA, 19 nt, Artificial Sequence
  Synthetic
agaaugagcccgaaccaga

SEQ ID NO: 20936 - RNA, 19 nt, Artificial Sequence
  Synthetic
gugaagaaggggaggcuga

SEQ ID NO: 20937 - RNA, 19 nt, Artificial Sequence
  Synthetic
cuccuggaccggaaagaaa

SEQ ID NO: 20938 - RNA, 19 nt, Artificial Sequence
  Synthetic
gaauuaucccgaaaaguua

SEQ ID NO: 20939 - RNA, 19 nt, Artificial Sequence
  Synthetic
ggaauuaucccgaaaaguu

SEQ ID NO: 20940 - RNA, 19 nt, Artificial Sequence
  Synthetic
gaggagaaccaggagaaga

SEQ ID NO: 20941 - RNA, 19 nt, Artificial Sequence
  Synthetic
agaaauggcugaaggaaaa

SEQ ID NO: 20942 - RNA, 19 nt, Artificial Sequence
  Synthetic
gagaauuggaagaggaaga

SEQ ID NO: 20943 - RNA, 19 nt, Artificial Sequence
  Synthetic
aagcaagacuucaagaaua

SEQ ID NO: 20944 - RNA, 19 nt, Artificial Sequence
  Synthetic
acuaggaauugaaggaaua

SEQ ID NO: 20945 - RNA, 19 nt, Artificial Sequence
  Synthetic
caagaaaccacuaggaauu

SEQ ID NO: 20946 - RNA, 19 nt, Artificial Sequence
  Synthetic
aaucagaucuucaggaaau

SEQ ID NO: 20947 - RNA, 19 nt, Artificial Sequence
  Synthetic
agcaagacuucaagaauaa

SEQ ID NO: 20948 - RNA, 19 nt, Artificial Sequence
  Synthetic
ggagaagggucuuauggaa

SEQ ID NO: 20949 - RNA, 19 nt, Artificial Sequence
  Synthetic
ggugauaaacagugaggau

SEQ ID NO: 20950 - RNA, 19 nt, Artificial Sequence
  Synthetic
ggaaguguauuuaaagcaa

SEQ ID NO: 20951 - RNA, 19 nt, Artificial Sequence
  Synthetic
gugaagacaguuugacuaa

SEQ ID NO: 20952 - RNA, 19 nt, Artificial Sequence
  Synthetic
ugaggugauucaagaaaua

SEQ ID NO: 20953 - RNA, 19 nt, Artificial Sequence
  Synthetic
agaccaugauugaacauaa

SEQ ID NO: 20954 - RNA, 19 nt, Artificial Sequence
  Synthetic
uggaagaggaagaagaaaa

SEQ ID NO: 20955 - RNA, 19 nt, Artificial Sequence
  Synthetic
ugauaaacagugaggauga

SEQ ID NO: 20956 - RNA, 19 nt, Artificial Sequence
  Synthetic
acaaguaccuguugaauca

SEQ ID NO: 20957 - RNA, 19 nt, Artificial Sequence
  Synthetic
gcccauauguuguaaagua

SEQ ID NO: 20958 - RNA, 19 nt, Artificial Sequence
  Synthetic
uggaguggcuggucaguua

SEQ ID NO: 20959 - RNA, 19 nt, Artificial Sequence
  Synthetic
gcgccuaagaguaaacuaa

SEQ ID NO: 20960 - RNA, 19 nt, Artificial Sequence
  Synthetic
aagaauaagagucacgaaa

SEQ ID NO: 20961 - RNA, 19 nt, Artificial Sequence
  Synthetic
ucuaauagcugaacugauu

SEQ ID NO: 20962 - RNA, 19 nt, Artificial Sequence
  Synthetic
gaucaaagcuaaaagacau

SEQ ID NO: 20963 - RNA, 19 nt, Artificial Sequence
  Synthetic
ggaagaagaagauggaacu

SEQ ID NO: 20964 - RNA, 19 nt, Artificial Sequence
  Synthetic
ccacaagcacgaugaguga

SEQ ID NO: 20965 - RNA, 19 nt, Artificial Sequence
  Synthetic
uaacagauacaauggcaaa

SEQ ID NO: 20966 - RNA, 19 nt, Artificial Sequence
  Synthetic
ccucaauacagaaggacau

SEQ ID NO: 20967 - RNA, 19 nt, Artificial Sequence
  Synthetic
caauggaacccuugcacaa

SEQ ID NO: 20968 - RNA, 19 nt, Artificial Sequence
  Synthetic
cuauggagaucaaagcuaa

SEQ ID NO: 20969 - RNA, 19 nt, Artificial Sequence
  Synthetic
cagaagcuauggagaucaa

SEQ ID NO: 20970 - RNA, 19 nt, Artificial Sequence
  Synthetic
ucacagaagcuauggagau

SEQ ID NO: 20971 - RNA, 19 nt, Artificial Sequence
  Synthetic
gaaaggauuugcagagaaa

SEQ ID NO: 20972 - RNA, 19 nt, Artificial Sequence
  Synthetic
cugaagaccuauauagaua

SEQ ID NO: 20973 - RNA, 19 nt, Artificial Sequence
  Synthetic
gggaagaggugcuuaagaa

SEQ ID NO: 20974 - RNA, 19 nt, Artificial Sequence
  Synthetic
cagaagacgcaauggauaa

SEQ ID NO: 20975 - RNA, 19 nt, Artificial Sequence
  Synthetic
ggagagaagcugaaggaga

SEQ ID NO: 20976 - RNA, 19 nt, Artificial Sequence
  Synthetic
ggaaauuuaucaugagaga

SEQ ID NO: 20977 - RNA, 19 nt, Artificial Sequence
  Synthetic
aaauaaagacggagaacuu

SEQ ID NO: 20978 - RNA, 19 nt, Artificial Sequence
  Synthetic
ugacauaauucauggauca

SEQ ID NO: 20979 - RNA, 19 nt, Artificial Sequence
  Synthetic
caagauuuaugguggauua

SEQ ID NO: 20980 - RNA, 19 nt, Artificial Sequence
  Synthetic
gaaaugaaaugcagcagaa

SEQ ID NO: 20981 - RNA, 19 nt, Artificial Sequence
  Synthetic
aggaauuguuggagauuuu

SEQ ID NO: 20982 - RNA, 19 nt, Artificial Sequence
  Synthetic
agacggagaacuuggauaa

SEQ ID NO: 20983 - RNA, 19 nt, Artificial Sequence
  Synthetic
ugaaggagacucaggguua

SEQ ID NO: 20984 - RNA, 19 nt, Artificial Sequence
  Synthetic
gagcaaauucugaugaaau

SEQ ID NO: 20985 - RNA, 19 nt, Artificial Sequence
  Synthetic
ggaagaggugcuuaagaaa

SEQ ID NO: 20986 - RNA, 19 nt, Artificial Sequence
  Synthetic
guacauugacuauggaaau

SEQ ID NO: 20987 - RNA, 19 nt, Artificial Sequence
  Synthetic
gaagaaacuuuaaagguca

SEQ ID NO: 20988 - RNA, 19 nt, Artificial Sequence
  Synthetic
gaagauacacauuacgaua

SEQ ID NO: 20989 - RNA, 19 nt, Artificial Sequence
  Synthetic
gcucauugccacaguacaa

SEQ ID NO: 20990 - RNA, 19 nt, Artificial Sequence
  Synthetic
cuauacaaguguuggauga

SEQ ID NO: 20991 - RNA, 19 nt, Artificial Sequence
  Synthetic
cauagaagaugcaguaaca

SEQ ID NO: 20992 - RNA, 19 nt, Artificial Sequence
  Synthetic
gcaaagagcuggagauagc

SEQ ID NO: 20993 - RNA, 19 nt, Artificial Sequence
  Synthetic
cguuagaauugaaaguaga

SEQ ID NO: 20994 - RNA, 19 nt, Artificial Sequence
  Synthetic
guucagacuuauaugcuua

SEQ ID NO: 20995 - RNA, 19 nt, Artificial Sequence
  Synthetic
ccauacuacccuagggcaa

SEQ ID NO: 20996 - RNA, 19 nt, Artificial Sequence
  Synthetic
gaagaaauaaagacggaga

SEQ ID NO: 20997 - RNA, 19 nt, Artificial Sequence
  Synthetic
ccagaaacugauugaagaa

SEQ ID NO: 20998 - RNA, 19 nt, Artificial Sequence
  Synthetic
ccauagagcuuggagagaa

SEQ ID NO: 20999 - RNA, 19 nt, Artificial Sequence
  Synthetic
guuauaaggcguuagaauu

SEQ ID NO: 21000 - RNA, 19 nt, Artificial Sequence
  Synthetic
cugcaaagagcuggagaua

SEQ ID NO: 21001 - RNA, 19 nt, Artificial Sequence
  Synthetic
ccucaaauguagagagaaa

SEQ ID NO: 21002 - RNA, 19 nt, Artificial Sequence
  Synthetic
caacagaagagaagaauaa

SEQ ID NO: 21003 - RNA, 19 nt, Artificial Sequence
  Synthetic
cagaaaguguugaggaaaa

SEQ ID NO: 21004 - RNA, 19 nt, Artificial Sequence
  Synthetic
ugauaguggcuuagauaaa

SEQ ID NO: 21005 - RNA, 19 nt, Artificial Sequence
  Synthetic
ucacauaaggauugagaau

SEQ ID NO: 21006 - RNA, 19 nt, Artificial Sequence
  Synthetic
cuaaggaacuacuagauaa

SEQ ID NO: 21007 - RNA, 19 nt, Artificial Sequence
  Synthetic
acagaaacgaagugggcaa

SEQ ID NO: 21008 - RNA, 19 nt, Artificial Sequence
  Synthetic
cagcugaaaucaagggaga

SEQ ID NO: 21009 - RNA, 19 nt, Artificial Sequence
  Synthetic
uuggaagaauauugggaaa

SEQ ID NO: 21010 - RNA, 19 nt, Artificial Sequence
  Synthetic
agauauaaccuccaggaaa

SEQ ID NO: 21011 - RNA, 19 nt, Artificial Sequence
  Synthetic
cagaugaagaggaggaaaa

SEQ ID NO: 21012 - RNA, 19 nt, Artificial Sequence
  Synthetic
cccagaaaguguugaggaa

SEQ ID NO: 21013 - RNA, 19 nt, Artificial Sequence
  Synthetic
caguuuuggugguggaaau

SEQ ID NO: 21014 - RNA, 19 nt, Artificial Sequence
  Synthetic
aagcauugguagugcagaa

SEQ ID NO: 21015 - RNA, 19 nt, Artificial Sequence
  Synthetic
acacaacagaagagaagaa

SEQ ID NO: 21016 - RNA, 19 nt, Artificial Sequence
  Synthetic
gcugaaaucaagggagaaa

SEQ ID NO: 21017 - RNA, 19 nt, Artificial Sequence
  Synthetic
cauaagugacugugcuaaa

SEQ ID NO: 21018 - RNA, 19 nt, Artificial Sequence
  Synthetic
ccauuaacuugcugcuaaa

SEQ ID NO: 21019 - RNA, 19 nt, Artificial Sequence
  Synthetic
gaaaucaacucaagaugua

SEQ ID NO: 21020 - RNA, 19 nt, Artificial Sequence
  Synthetic
gcagauaccuucaauuuaa

SEQ ID NO: 21021 - RNA, 19 nt, Artificial Sequence
  Synthetic
caacccacauuaagaaaua

SEQ ID NO: 21022 - RNA, 19 nt, Artificial Sequence
  Synthetic
acauaaaggugacugauuu

SEQ ID NO: 21023 - RNA, 19 nt, Artificial Sequence
  Synthetic
gcaacuuuacagaaggaaa

SEQ ID NO: 21024 - RNA, 19 nt, Artificial Sequence
  Synthetic
gcucagaagagaagcuuuu

SEQ ID NO: 21025 - RNA, 19 nt, Artificial Sequence
  Synthetic
guuauuacguggagaacca

SEQ ID NO: 21026 - RNA, 19 nt, Artificial Sequence
  Synthetic
ccaggaugguaauagguua

SEQ ID NO: 21027 - RNA, 19 nt, Artificial Sequence
  Synthetic
gaauaugugucuagugcau

SEQ ID NO: 21028 - RNA, 19 nt, Artificial Sequence
  Synthetic
gaaacgaagugggcaauua

SEQ ID NO: 21029 - RNA, 19 nt, Artificial Sequence
  Synthetic
caucauacaucuggaacaa

SEQ ID NO: 21030 - RNA, 19 nt, Artificial Sequence
  Synthetic
aaacaagaggccaaauaua

SEQ ID NO: 21031 - RNA, 19 nt, Artificial Sequence
  Synthetic
gagaaaggauccuggguua

SEQ ID NO: 21032 - RNA, 19 nt, Artificial Sequence
  Synthetic
gggcaaugauagaaagaau

SEQ ID NO: 21033 - RNA, 19 nt, Artificial Sequence
  Synthetic
ggucacaugugcugcuuaa

SEQ ID NO: 21034 - RNA, 19 nt, Artificial Sequence
  Synthetic
gcaaagagggcaaucaaga

SEQ ID NO: 21035 - RNA, 19 nt, Artificial Sequence
  Synthetic
gugaauaaguacuggcugu

SEQ ID NO: 21036 - RNA, 19 nt, Artificial Sequence
  Synthetic
caacaaaaguuucaugcua

SEQ ID NO: 21037 - RNA, 19 nt, Artificial Sequence
  Synthetic
gcagcuacggcgugguuua

SEQ ID NO: 21038 - RNA, 19 nt, Artificial Sequence
  Synthetic
ggugaggcgcugcuagaaa

SEQ ID NO: 21039 - RNA, 19 nt, Artificial Sequence
  Synthetic
cacaaagcccggagcggaa

SEQ ID NO: 21040 - RNA, 19 nt, Artificial Sequence
  Synthetic
gggcaaucaagacaacaaa

SEQ ID NO: 21041 - RNA, 19 nt, Artificial Sequence
  Synthetic
ggcauuaucaucugggcaa

SEQ ID NO: 21042 - RNA, 19 nt, Artificial Sequence
  Synthetic
aggcaaagagggcaaucaa

SEQ ID NO: 21043 - RNA, 19 nt, Artificial Sequence
  Synthetic
cugaagucugggagggaca

SEQ ID NO: 21044 - RNA, 19 nt, Artificial Sequence
  Synthetic
gcugaaaggagaaaggauc

SEQ ID NO: 21045 - RNA, 19 nt, Artificial Sequence
  Synthetic
ggguggcggucaagaagau

SEQ ID NO: 21046 - RNA, 19 nt, Artificial Sequence
  Synthetic
caaagauggaguugcacau

SEQ ID NO: 21047 - RNA, 19 nt, Artificial Sequence
  Synthetic
ggagaaaggauccuggguu

SEQ ID NO: 21048 - RNA, 19 nt, Artificial Sequence
  Synthetic
ccugcagcgcaauggguua

SEQ ID NO: 21049 - RNA, 19 nt, Artificial Sequence
  Synthetic
cagccaaggcggacaucuu

SEQ ID NO: 21050 - RNA, 19 nt, Artificial Sequence
  Synthetic
cggcgugguuuaugaggca

SEQ ID NO: 21051 - RNA, 19 nt, Artificial Sequence
  Synthetic
ccaaagauggaguugcaca

SEQ ID NO: 21052 - RNA, 19 nt, Artificial Sequence
  Synthetic
acccaaagauggaguugca

SEQ ID NO: 21053 - RNA, 19 nt, Artificial Sequence
  Synthetic
agggcaaucaagacaacaa

SEQ ID NO: 21054 - RNA, 19 nt, Artificial Sequence
  Synthetic
uuauugacucugagaccaa

SEQ ID NO: 21055 - RNA, 19 nt, Artificial Sequence
  Synthetic
gcgcaugagucacggcaac

SEQ ID NO: 21056 - RNA, 19 nt, Artificial Sequence
  Synthetic
ggaccggccugaugccuuu

SEQ ID NO: 21057 - RNA, 19 nt, Artificial Sequence
  Synthetic
agaccucgcugaaaggaga

SEQ ID NO: 21058 - RNA, 19 nt, Artificial Sequence
  Synthetic
cuacauggcuccugaaguc

SEQ ID NO: 21059 - RNA, 19 nt, Artificial Sequence
  Synthetic
acucugagaccaagaagga

SEQ ID NO: 21060 - RNA, 19 nt, Artificial Sequence
  Synthetic
ccgcagagguacacaaagc

SEQ ID NO: 21061 - RNA, 19 nt, Artificial Sequence
  Synthetic
ggauauaccuggagccauu

SEQ ID NO: 21062 - RNA, 19 nt, Artificial Sequence
  Synthetic
gagaaggagcugaggaauu

SEQ ID NO: 21063 - RNA, 19 nt, Artificial Sequence
  Synthetic
guacaagggucgaagaaaa

SEQ ID NO: 21064 - RNA, 19 nt, Artificial Sequence
  Synthetic
gcaacgagagauugaaaua

SEQ ID NO: 21065 - RNA, 19 nt, Artificial Sequence
  Synthetic
ggacagugaugaagacaga

SEQ ID NO: 21066 - RNA, 19 nt, Artificial Sequence
  Synthetic
caagaaacuagaagagauu

SEQ ID NO: 21067 - RNA, 19 nt, Artificial Sequence
  Synthetic
cagagaaggagcugaggaa

SEQ ID NO: 21068 - RNA, 19 nt, Artificial Sequence
  Synthetic
gcugagagcuaaagagacu

SEQ ID NO: 21069 - RNA, 19 nt, Artificial Sequence
  Synthetic
acaagaaacuagaagagau

SEQ ID NO: 21070 - RNA, 19 nt, Artificial Sequence
  Synthetic
gagcuaaagagacuagaaa

SEQ ID NO: 21071 - RNA, 19 nt, Artificial Sequence
  Synthetic
ggucaugucaccauaauaa

SEQ ID NO: 21072 - RNA, 19 nt, Artificial Sequence
  Synthetic
cagacuaugcugagggaga

SEQ ID NO: 21073 - RNA, 19 nt, Artificial Sequence
  Synthetic
gcaugaagcuggagggcag

SEQ ID NO: 21074 - RNA, 19 nt, Artificial Sequence
  Synthetic
ccuagaagaugacggaaaa

SEQ ID NO: 21075 - RNA, 19 nt, Artificial Sequence
  Synthetic
gagcaggucuguuggcauu

SEQ ID NO: 21076 - RNA, 19 nt, Artificial Sequence
  Synthetic
uugaagagcagcugggcua

SEQ ID NO: 21077 - RNA, 19 nt, Artificial Sequence
  Synthetic
gaauuugcaacgagagauu

SEQ ID NO: 21078 - RNA, 19 nt, Artificial Sequence
  Synthetic
cuuauaggcuccugggaca

SEQ ID NO: 21079 - RNA, 19 nt, Artificial Sequence
  Synthetic
ucagaaauguggaccguuu

SEQ ID NO: 21080 - RNA, 19 nt, Artificial Sequence
  Synthetic
gggacagcuuggucagcaa

SEQ ID NO: 21081 - RNA, 19 nt, Artificial Sequence
  Synthetic
uccuagaagaugacggaaa

SEQ ID NO: 21082 - RNA, 19 nt, Artificial Sequence
  Synthetic
caccaguucuagcgaguaa

SEQ ID NO: 21083 - RNA, 19 nt, Artificial Sequence
  Synthetic
ccacugagccugugccuau

SEQ ID NO: 21084 - RNA, 19 nt, Artificial Sequence
  Synthetic
gagagcagagugaggauau

SEQ ID NO: 21085 - RNA, 19 nt, Artificial Sequence
  Synthetic
gcuaugagcaccaauacaa

SEQ ID NO: 21086 - RNA, 19 nt, Artificial Sequence
  Synthetic
caucaagcucugugacuuu

SEQ ID NO: 21087 - RNA, 19 nt, Artificial Sequence
  Synthetic
auaugaagccucagaacau

SEQ ID NO: 21088 - RNA, 19 nt, Artificial Sequence
  Synthetic
ccucagaauugaagagcag

SEQ ID NO: 21089 - RNA, 19 nt, Artificial Sequence
  Synthetic
cagaagaaacaucagaaca

SEQ ID NO: 21090 - RNA, 19 nt, Artificial Sequence
  Synthetic
cagcuuugaaacugauaaa

SEQ ID NO: 21091 - RNA, 19 nt, Artificial Sequence
  Synthetic
gugaugaacuggaaagaaa

SEQ ID NO: 21092 - RNA, 19 nt, Artificial Sequence
  Synthetic
ggacagaauuuuauaggaa

SEQ ID NO: 21093 - RNA, 19 nt, Artificial Sequence
  Synthetic
gagcagaguucuuuguaua

SEQ ID NO: 21094 - RNA, 19 nt, Artificial Sequence
  Synthetic
cagcaagggccaugugaaa

SEQ ID NO: 21095 - RNA, 19 nt, Artificial Sequence
  Synthetic
gcacaugcucggaaggaaa

SEQ ID NO: 21096 - RNA, 19 nt, Artificial Sequence
  Synthetic
ggaugaaggugauguguuu

SEQ ID NO: 21097 - RNA, 19 nt, Artificial Sequence
  Synthetic
gaacgagaaaugagacaaa

SEQ ID NO: 21098 - RNA, 19 nt, Artificial Sequence
  Synthetic
ggaacauaucagagagaga

SEQ ID NO: 21099 - RNA, 19 nt, Artificial Sequence
  Synthetic
agagagaccugcugcaaua

SEQ ID NO: 21100 - RNA, 19 nt, Artificial Sequence
  Synthetic
caacaugaagaacgagaaa

SEQ ID NO: 21101 - RNA, 19 nt, Artificial Sequence
  Synthetic
gcagaaaccuggaaaagaa

SEQ ID NO: 21102 - RNA, 19 nt, Artificial Sequence
  Synthetic
aguaauaggcagaggagca

SEQ ID NO: 21103 - RNA, 19 nt, Artificial Sequence
  Synthetic
ccuaaaagaugaggagaaa

SEQ ID NO: 21104 - RNA, 19 nt, Artificial Sequence
  Synthetic
ccauaguacuaaggaaaua

SEQ ID NO: 21105 - RNA, 19 nt, Artificial Sequence
  Synthetic
uagaaaaggugauggaaga

SEQ ID NO: 21106 - RNA, 19 nt, Artificial Sequence
  Synthetic
cauauaagaaggugaugaa

SEQ ID NO: 21107 - RNA, 19 nt, Artificial Sequence
  Synthetic
ugacagaagaggagacuca

SEQ ID NO: 21108 - RNA, 19 nt, Artificial Sequence
  Synthetic
gaaaguauguccuagcuua

SEQ ID NO: 21109 - RNA, 19 nt, Artificial Sequence
  Synthetic
gauucuggcugaaggaaau

SEQ ID NO: 21110 - RNA, 19 nt, Artificial Sequence
  Synthetic
agaaacaguauuagccaua

SEQ ID NO: 21111 - RNA, 19 nt, Artificial Sequence
  Synthetic
guacagagccagcugacaa

SEQ ID NO: 21112 - RNA, 19 nt, Artificial Sequence
  Synthetic
caacaguggccacaaguaa

SEQ ID NO: 21113 - RNA, 19 nt, Artificial Sequence
  Synthetic
aagaaauagacgucagcua

SEQ ID NO: 21114 - RNA, 19 nt, Artificial Sequence
  Synthetic
gccuaaaagaugaggagaa

SEQ ID NO: 21115 - RNA, 19 nt, Artificial Sequence
  Synthetic
gugaaugggaacauagaau

SEQ ID NO: 21116 - RNA, 19 nt, Artificial Sequence
  Synthetic
caaaggaaagggugacaau

SEQ ID NO: 21117 - RNA, 19 nt, Artificial Sequence
  Synthetic
agaagaaagauacgggaca

SEQ ID NO: 21118 - RNA, 19 nt, Artificial Sequence
  Synthetic
agacugacuacaagaacaa

SEQ ID NO: 21119 - RNA, 19 nt, Artificial Sequence
  Synthetic
guacuaagauaaagacugu

SEQ ID NO: 21120 - RNA, 19 nt, Artificial Sequence
  Synthetic
gaagaaagauacgggacau

SEQ ID NO: 21121 - RNA, 19 nt, Artificial Sequence
  Synthetic
cagcaugaagagagagaaa

SEQ ID NO: 21122 - RNA, 19 nt, Artificial Sequence
  Synthetic
gcaaaguacccuugagauu

SEQ ID NO: 21123 - RNA, 19 nt, Artificial Sequence
  Synthetic
aggaaauucuacaggauua

SEQ ID NO: 21124 - RNA, 19 nt, Artificial Sequence
  Synthetic
ggaaagaaacucugguauu

SEQ ID NO: 21125 - RNA, 19 nt, Artificial Sequence
  Synthetic
gcagaaacuuggaagaaga

SEQ ID NO: 21126 - RNA, 19 nt, Artificial Sequence
  Synthetic
uggaaauaguggaguagaa

SEQ ID NO: 21127 - RNA, 19 nt, Artificial Sequence
  Synthetic
ucugaaaguuauaggaaga

SEQ ID NO: 21128 - RNA, 19 nt, Artificial Sequence
  Synthetic
gaagaaagauacaggccau

SEQ ID NO: 21129 - RNA, 19 nt, Artificial Sequence
  Synthetic
gggucuagauaaucaguaa

SEQ ID NO: 21130 - RNA, 19 nt, Artificial Sequence
  Synthetic
ccacagaaccggacuacaa

SEQ ID NO: 21131 - RNA, 19 nt, Artificial Sequence
  Synthetic
caugaaagcugggaaguua

SEQ ID NO: 21132 - RNA, 19 nt, Artificial Sequence
  Synthetic
cauggaagaagaaggauua

SEQ ID NO: 21133 - RNA, 19 nt, Artificial Sequence
  Synthetic
uuacauugcuccagaagua

SEQ ID NO: 21134 - RNA, 19 nt, Artificial Sequence
  Synthetic
gcagcaaucccuauagaaa

SEQ ID NO: 21135 - RNA, 19 nt, Artificial Sequence
  Synthetic
ggacuuaauucucagauuu

SEQ ID NO: 21136 - RNA, 19 nt, Artificial Sequence
  Synthetic
ugaaacaccucaagaaaca

SEQ ID NO: 21137 - RNA, 19 nt, Artificial Sequence
  Synthetic
aaauaguggaguagaagaa

SEQ ID NO: 21138 - RNA, 19 nt, Artificial Sequence
  Synthetic
ggacauggcauuauuuuaa

SEQ ID NO: 21139 - RNA, 19 nt, Artificial Sequence
  Synthetic
gaaaauaaguguggaguau

SEQ ID NO: 21140 - RNA, 19 nt, Artificial Sequence
  Synthetic
ccauggaagaagaaggauu

SEQ ID NO: 21141 - RNA, 19 nt, Artificial Sequence
  Synthetic
auuagcagaugaagagaaa

SEQ ID NO: 21142 - RNA, 19 nt, Artificial Sequence
  Synthetic
cagaaauacugaugaccuu

SEQ ID NO: 21143 - RNA, 19 nt, Artificial Sequence
  Synthetic
gaaagaaacucugguauuu

SEQ ID NO: 21144 - RNA, 19 nt, Artificial Sequence
  Synthetic
uaguggaguagaagaaaua

SEQ ID NO: 21145 - RNA, 19 nt, Artificial Sequence
  Synthetic
aauuggaaauaguggagua

SEQ ID NO: 21146 - RNA, 19 nt, Artificial Sequence
  Synthetic
agacaaaguuuaacaccuu

SEQ ID NO: 21147 - RNA, 19 nt, Artificial Sequence
  Synthetic
ggaaagagagcuauuaaaa

SEQ ID NO: 21148 - RNA, 19 nt, Artificial Sequence
  Synthetic
gcugggaaguuaugaauga

SEQ ID NO: 21149 - RNA, 19 nt, Artificial Sequence
  Synthetic
guaaauggacuuauagaga

SEQ ID NO: 21150 - RNA, 19 nt, Artificial Sequence
  Synthetic
gcaagaacguguagcaaua

SEQ ID NO: 21151 - RNA, 19 nt, Artificial Sequence
  Synthetic
ggauaucccuuaagugaaa

SEQ ID NO: 21152 - RNA, 19 nt, Artificial Sequence
  Synthetic
aaacagggguagaggauaa

SEQ ID NO: 21153 - RNA, 19 nt, Artificial Sequence
  Synthetic
ggguagaggauaaagaaau

SEQ ID NO: 21154 - RNA, 19 nt, Artificial Sequence
  Synthetic
ggucagauucacagggauu

SEQ ID NO: 21155 - RNA, 19 nt, Artificial Sequence
  Synthetic
ugacauacgauuugaguuu

SEQ ID NO: 21156 - RNA, 19 nt, Artificial Sequence
  Synthetic
aagaagaguuccuggguca

SEQ ID NO: 21157 - RNA, 19 nt, Artificial Sequence
  Synthetic
gaagaugacugcaaaggua

SEQ ID NO: 21158 - RNA, 19 nt, Artificial Sequence
  Synthetic
acacagaaacggucagauu

SEQ ID NO: 21159 - RNA, 19 nt, Artificial Sequence
  Synthetic
gaagagcgaagaagggaaa

SEQ ID NO: 21160 - RNA, 19 nt, Artificial Sequence
  Synthetic
cauguggaguuuuggaaua

SEQ ID NO: 21161 - RNA, 19 nt, Artificial Sequence
  Synthetic
cuaguaaaccuuaggauuu

SEQ ID NO: 21162 - RNA, 19 nt, Artificial Sequence
  Synthetic
gaaaggaacuuaaugacau

SEQ ID NO: 21163 - RNA, 19 nt, Artificial Sequence
  Synthetic
gaaaagucacgaagaguaa

SEQ ID NO: 21164 - RNA, 19 nt, Artificial Sequence
  Synthetic
aggaagagauacagcagau

SEQ ID NO: 21165 - RNA, 19 nt, Artificial Sequence
  Synthetic
caguauggaugaacuauua

SEQ ID NO: 21166 - RNA, 19 nt, Artificial Sequence
  Synthetic
gauuaagaaacuccagaaa

SEQ ID NO: 21167 - RNA, 19 nt, Artificial Sequence
  Synthetic
gagaguaccugauugagaa

SEQ ID NO: 21168 - RNA, 19 nt, Artificial Sequence
  Synthetic
caacaggagcagcgccuua

SEQ ID NO: 21169 - RNA, 19 nt, Artificial Sequence
  Synthetic
ccagaaaggaacuuaauga

SEQ ID NO: 21170 - RNA, 19 nt, Artificial Sequence
  Synthetic
ucagaaagauccuuccaaa

SEQ ID NO: 21171 - RNA, 19 nt, Artificial Sequence
  Synthetic
ggaaaagucacgaagagua

SEQ ID NO: 21172 - RNA, 19 nt, Artificial Sequence
  Synthetic
auuacuaaguggagguuca

SEQ ID NO: 21173 - RNA, 19 nt, Artificial Sequence
  Synthetic
ggaacaggugagaggcuau

SEQ ID NO: 21174 - RNA, 19 nt, Artificial Sequence
  Synthetic
ugauguuacccgaaauaaa

SEQ ID NO: 21175 - RNA, 19 nt, Artificial Sequence
  Synthetic
guaauauucuucuggguga

SEQ ID NO: 21176 - RNA, 19 nt, Artificial Sequence
  Synthetic
acgacgagauggaugagaa

SEQ ID NO: 21177 - RNA, 19 nt, Artificial Sequence
  Synthetic
acagaagauuguagaugau

SEQ ID NO: 21178 - RNA, 19 nt, Artificial Sequence
  Synthetic
gcuaugacuucaaggcuga

SEQ ID NO: 21179 - RNA, 19 nt, Artificial Sequence
  Synthetic
guucaauguuggauaucau

SEQ ID NO: 21180 - RNA, 19 nt, Artificial Sequence
  Synthetic
caacaaaacuucugagcaa

SEQ ID NO: 21181 - RNA, 19 nt, Artificial Sequence
  Synthetic
uagaaauggcugaaggaaa

SEQ ID NO: 21182 - RNA, 19 nt, Artificial Sequence
  Synthetic
cagaagugauucaggaaau

SEQ ID NO: 21183 - RNA, 19 nt, Artificial Sequence
  Synthetic
ggaauaacugccauagaaa

SEQ ID NO: 21184 - RNA, 19 nt, Artificial Sequence
  Synthetic
augcagaggaugaggaaga

SEQ ID NO: 21185 - RNA, 19 nt, Artificial Sequence
  Synthetic
gcuaaauacagaaggacau

SEQ ID NO: 21186 - RNA, 19 nt, Artificial Sequence
  Synthetic
caaacaaccagaagaagua

SEQ ID NO: 21187 - RNA, 19 nt, Artificial Sequence
  Synthetic
gggaauaacugccauagaa

SEQ ID NO: 21188 - RNA, 19 nt, Artificial Sequence
  Synthetic
cggaauacagugauaggaa

SEQ ID NO: 21189 - RNA, 19 nt, Artificial Sequence
  Synthetic
ggagauaaucaaagaaauc

SEQ ID NO: 21190 - RNA, 19 nt, Artificial Sequence
  Synthetic
agaaauggcugaaggaaag

SEQ ID NO: 21191 - RNA, 19 nt, Artificial Sequence
  Synthetic
ggaccaggacgaugaagaa

SEQ ID NO: 21192 - RNA, 19 nt, Artificial Sequence
  Synthetic
acucagaagaggaugaaau

SEQ ID NO: 21193 - RNA, 19 nt, Artificial Sequence
  Synthetic
caggagauaaucaaagaaa

SEQ ID NO: 21194 - RNA, 19 nt, Artificial Sequence
  Synthetic
aagaagagacggcaacaaa

SEQ ID NO: 21195 - RNA, 19 nt, Artificial Sequence
  Synthetic
cagaagaaguauuugaugu

SEQ ID NO: 21196 - RNA, 19 nt, Artificial Sequence
  Synthetic
gggaaguggaccaggacga

SEQ ID NO: 21197 - RNA, 19 nt, Artificial Sequence
  Synthetic
gaauacagugauaggaaca

SEQ ID NO: 21198 - RNA, 19 nt, Artificial Sequence
  Synthetic
ggauggagacuacgaguuu

SEQ ID NO: 21199 - RNA, 19 nt, Artificial Sequence
  Synthetic
gucaauacugcgagacuua

SEQ ID NO: 21200 - RNA, 19 nt, Artificial Sequence
  Synthetic
ugaucaaugcagaggauga

SEQ ID NO: 21201 - RNA, 19 nt, Artificial Sequence
  Synthetic
caagcggaauacagugaua

SEQ ID NO: 21202 - RNA, 19 nt, Artificial Sequence
  Synthetic
ccaaacaaccagaagaagu

SEQ ID NO: 21203 - RNA, 19 nt, Artificial Sequence
  Synthetic
cguuaacagaagaugaaau

SEQ ID NO: 21204 - RNA, 19 nt, Artificial Sequence
  Synthetic
ccagaagugauucaggaaa

SEQ ID NO: 21205 - RNA, 19 nt, Artificial Sequence
  Synthetic
cagaagaggaugaaaugga

SEQ ID NO: 21206 - RNA, 19 nt, Artificial Sequence
  Synthetic
ugauggagcaggagauuga

SEQ ID NO: 21207 - RNA, 19 nt, Artificial Sequence
  Synthetic
gugaaacagugucuuguaa

SEQ ID NO: 21208 - RNA, 19 nt, Artificial Sequence
  Synthetic
gagauaucaaggcaggaaa

SEQ ID NO: 21209 - RNA, 19 nt, Artificial Sequence
  Synthetic
agaggaaggaacuaugaaa

SEQ ID NO: 21210 - RNA, 19 nt, Artificial Sequence
  Synthetic
cagaagagaaguagaaaua

SEQ ID NO: 21211 - RNA, 19 nt, Artificial Sequence
  Synthetic
agucauagcauguguguaa

SEQ ID NO: 21212 - RNA, 19 nt, Artificial Sequence
  Synthetic
guuaaggagcugugcaaua

SEQ ID NO: 21213 - RNA, 19 nt, Artificial Sequence
  Synthetic
gaagagaaguagaaauaca

SEQ ID NO: 21214 - RNA, 19 nt, Artificial Sequence
  Synthetic
gcucagaagagaaguagaa

SEQ ID NO: 21215 - RNA, 19 nt, Artificial Sequence
  Synthetic
ugucauucgaagagaguua

SEQ ID NO: 21216 - RNA, 19 nt, Artificial Sequence
  Synthetic
acacauaccaagagaccua

SEQ ID NO: 21217 - RNA, 19 nt, Artificial Sequence
  Synthetic
gaacuuacuucuuggauca

SEQ ID NO: 21218 - RNA, 19 nt, Artificial Sequence
  Synthetic
gguaauguuuauuuggcaa

SEQ ID NO: 21219 - RNA, 19 nt, Artificial Sequence
  Synthetic
acauuaagccagagaacuu

SEQ ID NO: 21220 - RNA, 19 nt, Artificial Sequence
  Synthetic
ggauacugcuuguuacuua

SEQ ID NO: 21221 - RNA, 19 nt, Artificial Sequence
  Synthetic
guaaaggaaaguuugguaa

SEQ ID NO: 21222 - RNA, 19 nt, Artificial Sequence
  Synthetic
guuuauuuggcaagagaaa

SEQ ID NO: 21223 - RNA, 19 nt, Artificial Sequence
  Synthetic
gcaauuuccuugucagaau

SEQ ID NO: 21224 - RNA, 19 nt, Artificial Sequence
  Synthetic
ggaacaugcuacugaaguu

SEQ ID NO: 21225 - RNA, 19 nt, Artificial Sequence
  Synthetic
ugguaaagcuguuggaaug

SEQ ID NO: 21226 - RNA, 19 nt, Artificial Sequence
  Synthetic
gaacgcuacacaagaaaua

SEQ ID NO: 21227 - RNA, 19 nt, Artificial Sequence
  Synthetic
gaagagaguuauucauaga

SEQ ID NO: 21228 - RNA, 19 nt, Artificial Sequence
  Synthetic
acaaagaaucagcuagcaa

SEQ ID NO: 21229 - RNA, 19 nt, Artificial Sequence
  Synthetic
caagacuguugaagcauaa

SEQ ID NO: 21230 - RNA, 19 nt, Artificial Sequence
  Synthetic
aaucagaagcagaagcaau

SEQ ID NO: 21231 - RNA, 19 nt, Artificial Sequence
  Synthetic
gguaaaggaaaguuuggua

SEQ ID NO: 21232 - RNA, 19 nt, Artificial Sequence
  Synthetic
guucagaaucagaagcaga

SEQ ID NO: 21233 - RNA, 19 nt, Artificial Sequence
  Synthetic
caucauggaccgaucuaaa

SEQ ID NO: 21234 - RNA, 19 nt, Artificial Sequence
  Synthetic
gcaaacagucuuaggaauc

SEQ ID NO: 21235 - RNA, 19 nt, Artificial Sequence
  Synthetic
caaagaaucagcuagcaaa

SEQ ID NO: 21236 - RNA, 19 nt, Artificial Sequence
  Synthetic
gagaacugcuacuuauaua

SEQ ID NO: 21237 - RNA, 19 nt, Artificial Sequence
  Synthetic
gccaaugcucagagaagua

SEQ ID NO: 21238 - RNA, 19 nt, Artificial Sequence
  Synthetic
auagagaacuucagaaacu

SEQ ID NO: 21239 - RNA, 19 nt, Artificial Sequence
  Synthetic
ggaacaguuuauagagaac

SEQ ID NO: 21240 - RNA, 19 nt, Artificial Sequence
  Synthetic
gauagaagcuuuggagaaa

SEQ ID NO: 21241 - RNA, 19 nt, Artificial Sequence
  Synthetic
gauacuggcuuuacagaaa

SEQ ID NO: 21242 - RNA, 19 nt, Artificial Sequence
  Synthetic
gcucaauagugaagaaaug

SEQ ID NO: 21243 - RNA, 19 nt, Artificial Sequence
  Synthetic
ggaaaggacagauguguuu

SEQ ID NO: 21244 - RNA, 19 nt, Artificial Sequence
  Synthetic
gaacacagcaagaauggaa

SEQ ID NO: 21245 - RNA, 19 nt, Artificial Sequence
  Synthetic
caaacaugaugaaguagua

SEQ ID NO: 21246 - RNA, 19 nt, Artificial Sequence
  Synthetic
cagaauggcugacagaaau

SEQ ID NO: 21247 - RNA, 19 nt, Artificial Sequence
  Synthetic
ugacauauucugacaaaga

SEQ ID NO: 21248 - RNA, 19 nt, Artificial Sequence
  Synthetic
gaaagaacacagcaagaau

SEQ ID NO: 21249 - RNA, 19 nt, Artificial Sequence
  Synthetic
gugaacagcuggccaaaga

SEQ ID NO: 21250 - RNA, 19 nt, Artificial Sequence
  Synthetic
gaaaggaggagucaaggaa

SEQ ID NO: 21251 - RNA, 19 nt, Artificial Sequence
  Synthetic
gccaauagcaaaugaaguu

SEQ ID NO: 21252 - RNA, 19 nt, Artificial Sequence
  Synthetic
uuaaagaucgcuucaguaa

SEQ ID NO: 21253 - RNA, 19 nt, Artificial Sequence
  Synthetic
gggaagaaucugagcaaau

SEQ ID NO: 21254 - RNA, 19 nt, Artificial Sequence
  Synthetic
gaucaaagacaaauggaaa

SEQ ID NO: 21255 - RNA, 19 nt, Artificial Sequence
  Synthetic
ggaauaaucucaagaauca

SEQ ID NO: 21256 - RNA, 19 nt, Artificial Sequence
  Synthetic
gggaggaggcagaagauua

SEQ ID NO: 21257 - RNA, 19 nt, Artificial Sequence
  Synthetic
gggcaugagugaugggcuu

SEQ ID NO: 21258 - RNA, 19 nt, Artificial Sequence
  Synthetic
acuaugacguggugaacua

SEQ ID NO: 21259 - RNA, 19 nt, Artificial Sequence
  Synthetic
agaaauguguugcuaguua

SEQ ID NO: 21260 - RNA, 19 nt, Artificial Sequence
  Synthetic
acagacaugucaaggauaa

SEQ ID NO: 21261 - RNA, 19 nt, Artificial Sequence
  Synthetic
aguuauuagcagaagcaaa

SEQ ID NO: 21262 - RNA, 19 nt, Artificial Sequence
  Synthetic
gaaaauguauccagaggaa

SEQ ID NO: 21263 - RNA, 19 nt, Artificial Sequence
  Synthetic
gcaagagaguacuguguca

SEQ ID NO: 21264 - RNA, 19 nt, Artificial Sequence
  Synthetic
guuauuagcagaagcaaau

SEQ ID NO: 21265 - RNA, 19 nt, Artificial Sequence
  Synthetic
aguacuuggaggagagcaa

SEQ ID NO: 21266 - RNA, 19 nt, Artificial Sequence
  Synthetic
cuuauaaagcagaugguuu

SEQ ID NO: 21267 - RNA, 19 nt, Artificial Sequence
  Synthetic
aaauguauccagaggaauu

SEQ ID NO: 21268 - RNA, 19 nt, Artificial Sequence
  Synthetic
ggaucaaagacaaauggaa

SEQ ID NO: 21269 - RNA, 19 nt, Artificial Sequence
  Synthetic
gcacacagggaaauguuaa

SEQ ID NO: 21270 - RNA, 19 nt, Artificial Sequence
  Synthetic
uuugaggauuugaaggaaa

SEQ ID NO: 21271 - RNA, 19 nt, Artificial Sequence
  Synthetic
gcacuaucgcaucgacaaa

SEQ ID NO: 21272 - RNA, 19 nt, Artificial Sequence
  Synthetic
ccaguuaaggaaagaaaga

SEQ ID NO: 21273 - RNA, 19 nt, Artificial Sequence
  Synthetic
gaacagacaugucaaggau

SEQ ID NO: 21274 - RNA, 19 nt, Artificial Sequence
  Synthetic
guggaauaaucucaagaau

SEQ ID NO: 21275 - RNA, 19 nt, Artificial Sequence
  Synthetic
cauggaaccugcaggguca

SEQ ID NO: 21276 - RNA, 19 nt, Artificial Sequence
  Synthetic
gcaugaaguacuuggagga

SEQ ID NO: 21277 - RNA, 19 nt, Artificial Sequence
  Synthetic
caagaaauguguugcuagu

SEQ ID NO: 21278 - RNA, 19 nt, Artificial Sequence
  Synthetic
ggcagcuagucgagcauua

SEQ ID NO: 21279 - RNA, 19 nt, Artificial Sequence
  Synthetic
cggaaugcaucaacuacua

SEQ ID NO: 21280 - RNA, 19 nt, Artificial Sequence
  Synthetic
gcaauuuugugcacagaga

SEQ ID NO: 21281 - RNA, 19 nt, Artificial Sequence
  Synthetic
cuggagaagcugaucgcua

SEQ ID NO: 21282 - RNA, 19 nt, Artificial Sequence
  Synthetic
gggaauaugugaagcagac

SEQ ID NO: 21283 - RNA, 19 nt, Artificial Sequence
  Synthetic
caugauagcugcagagcaa

SEQ ID NO: 21284 - RNA, 19 nt, Artificial Sequence
  Synthetic
ccaaucaacuggagauaua

SEQ ID NO: 21285 - RNA, 19 nt, Artificial Sequence
  Synthetic
ggaaggaacuacagcgaau

SEQ ID NO: 21286 - RNA, 19 nt, Artificial Sequence
  Synthetic
caaccaagauaaagaacua

SEQ ID NO: 21287 - RNA, 19 nt, Artificial Sequence
  Synthetic
ggagaaagaggaagaagaa

SEQ ID NO: 21288 - RNA, 19 nt, Artificial Sequence
  Synthetic
gggaaagcgucuuggauga

SEQ ID NO: 21289 - RNA, 19 nt, Artificial Sequence
  Synthetic
gaaagaacauugagaacau

SEQ ID NO: 21290 - RNA, 19 nt, Artificial Sequence
  Synthetic
gagaagaugaugaggaaga

SEQ ID NO: 21291 - RNA, 19 nt, Artificial Sequence
  Synthetic
ggaccaaugaagaaggaua

SEQ ID NO: 21292 - RNA, 19 nt, Artificial Sequence
  Synthetic
cuagaaugauagaggaauu

SEQ ID NO: 21293 - RNA, 19 nt, Artificial Sequence
  Synthetic
gggaauuaguggauauuuu

SEQ ID NO: 21294 - RNA, 19 nt, Artificial Sequence
  Synthetic
gaagaagagaucagagcua

SEQ ID NO: 21295 - RNA, 19 nt, Artificial Sequence
  Synthetic
aggagaagaugaugaggaa

SEQ ID NO: 21296 - RNA, 19 nt, Artificial Sequence
  Synthetic
cagaagaugcuguggacua

SEQ ID NO: 21297 - RNA, 19 nt, Artificial Sequence
  Synthetic
ggauauuuguacugcuaaa

SEQ ID NO: 21298 - RNA, 19 nt, Artificial Sequence
  Synthetic
gggaggaacaggagcggaa

SEQ ID NO: 21299 - RNA, 19 nt, Artificial Sequence
  Synthetic
cuacaaaagaugaggaauu

SEQ ID NO: 21300 - RNA, 19 nt, Artificial Sequence
  Synthetic
gcggaggauucaagagcaa

SEQ ID NO: 21301 - RNA, 19 nt, Artificial Sequence
  Synthetic
gcuuaugucugaaggagaa

SEQ ID NO: 21302 - RNA, 19 nt, Artificial Sequence
  Synthetic
gcacagggauggacucaaa

SEQ ID NO: 21303 - RNA, 19 nt, Artificial Sequence
  Synthetic
gagaagaagcccaagaaaa

SEQ ID NO: 21304 - RNA, 19 nt, Artificial Sequence
  Synthetic
cggagaaagaggaagaaga

SEQ ID NO: 21305 - RNA, 19 nt, Artificial Sequence
  Synthetic
cuucauaagaugccagaaa

SEQ ID NO: 21306 - RNA, 19 nt, Artificial Sequence
  Synthetic
ucgaauucucuuagggaaa

SEQ ID NO: 21307 - RNA, 19 nt, Artificial Sequence
  Synthetic
ucaaagagaaagaagacaa

SEQ ID NO: 21308 - RNA, 19 nt, Artificial Sequence
  Synthetic
cagaagaacaggaggagga

SEQ ID NO: 21309 - RNA, 19 nt, Artificial Sequence
  Synthetic
cagaauauagugaggaaaa

SEQ ID NO: 21310 - RNA, 19 nt, Artificial Sequence
  Synthetic
gaccaaugaagaaggauaa

SEQ ID NO: 21311 - RNA, 19 nt, Artificial Sequence
  Synthetic
aggaagaagaugaggagga

SEQ ID NO: 21312 - RNA, 19 nt, Artificial Sequence
  Synthetic
gguuaggaguacagaagau

SEQ ID NO: 21313 - RNA, 19 nt, Artificial Sequence
  Synthetic
gcuuauaucugaaggagaa

SEQ ID NO: 21314 - RNA, 19 nt, Artificial Sequence
  Synthetic
ggaaggaacuguacaacaa

SEQ ID NO: 21315 - RNA, 19 nt, Artificial Sequence
  Synthetic
ggauauuuguacagcuaaa

SEQ ID NO: 21316 - RNA, 19 nt, Artificial Sequence
  Synthetic
cuagaaugauggaggaauu

SEQ ID NO: 21317 - RNA, 19 nt, Artificial Sequence
  Synthetic
guagauaaagugacagaua

SEQ ID NO: 21318 - RNA, 19 nt, Artificial Sequence
  Synthetic
caugauagcugcaaagcaa

SEQ ID NO: 21319 - RNA, 19 nt, Artificial Sequence
  Synthetic
ggaaacagcuaauugagaa

SEQ ID NO: 21320 - RNA, 19 nt, Artificial Sequence
  Synthetic
ccucagagaaaguggauuu

SEQ ID NO: 21321 - RNA, 19 nt, Artificial Sequence
  Synthetic
gcacagggauggauucaaa

SEQ ID NO: 21322 - RNA, 19 nt, Artificial Sequence
  Synthetic
cgaagauggcaguggguuu

SEQ ID NO: 21323 - RNA, 19 nt, Artificial Sequence
  Synthetic
ccaaucaacuggagaugua

SEQ ID NO: 21324 - RNA, 19 nt, Artificial Sequence
  Synthetic
cagaagagcaggaggagga

SEQ ID NO: 21325 - RNA, 19 nt, Artificial Sequence
  Synthetic
gggaagagaugcggaaaga

SEQ ID NO: 21326 - RNA, 19 nt, Artificial Sequence
  Synthetic
agaagaugcuguagacuau

SEQ ID NO: 21327 - RNA, 19 nt, Artificial Sequence
  Synthetic
gugaagacauugauugcaa

SEQ ID NO: 21328 - RNA, 19 nt, Artificial Sequence
  Synthetic
agugaaagauccauggaau

SEQ ID NO: 21329 - RNA, 19 nt, Artificial Sequence
  Synthetic
cagaagaugcuguagacua

SEQ ID NO: 21330 - RNA, 19 nt, Artificial Sequence
  Synthetic
gggcgaaagccgaggaaga

SEQ ID NO: 21331 - RNA, 19 nt, Artificial Sequence
  Synthetic
gcaaccagcuggaguacaa

SEQ ID NO: 21332 - RNA, 19 nt, Artificial Sequence
  Synthetic
cuaaggagcugcagaucaa

SEQ ID NO: 21333 - RNA, 19 nt, Artificial Sequence
  Synthetic
aggaagaggaggaggagga

SEQ ID NO: 21334 - RNA, 19 nt, Artificial Sequence
  Synthetic
cgagcuggcugaacggaaa

SEQ ID NO: 21335 - RNA, 19 nt, Artificial Sequence
  Synthetic
gggaggaccugaacaagaa

SEQ ID NO: 21336 - RNA, 19 nt, Artificial Sequence
  Synthetic
gcacagaagcggaccuaca

SEQ ID NO: 21337 - RNA, 19 nt, Artificial Sequence
  Synthetic
aggaacagcugaaggagga

SEQ ID NO: 21338 - RNA, 19 nt, Artificial Sequence
  Synthetic
gagaugugcgugucaaaua

SEQ ID NO: 21339 - RNA, 19 nt, Artificial Sequence
  Synthetic
aagggugggucuagacaua

SEQ ID NO: 21340 - RNA, 19 nt, Artificial Sequence
  Synthetic
gggaagcaguccaaugaga

SEQ ID NO: 21341 - RNA, 19 nt, Artificial Sequence
  Synthetic
ccaagagccucaaaucuaa

SEQ ID NO: 21342 - RNA, 19 nt, Artificial Sequence
  Synthetic
gggaugugaaggcuggaaa

SEQ ID NO: 21343 - RNA, 19 nt, Artificial Sequence
  Synthetic
cugacaaccuauaugauga

SEQ ID NO: 21344 - RNA, 19 nt, Artificial Sequence
  Synthetic
acaacgaggaagaggagga

SEQ ID NO: 21345 - RNA, 19 nt, Artificial Sequence
  Synthetic
aggaggaggaagaggagga

SEQ ID NO: 21346 - RNA, 19 nt, Artificial Sequence
  Synthetic
aagaggaggccgagcccua

SEQ ID NO: 21347 - RNA, 19 nt, Artificial Sequence
  Synthetic
aggaggaagaggaggagga

SEQ ID NO: 21348 - RNA, 19 nt, Artificial Sequence
  Synthetic
agaaauggcaagacaucau

SEQ ID NO: 21349 - RNA, 19 nt, Artificial Sequence
  Synthetic
acgaggaagaggaggagga

SEQ ID NO: 21350 - RNA, 19 nt, Artificial Sequence
  Synthetic
ggaaauaucaugcguguua

SEQ ID NO: 21351 - RNA, 19 nt, Artificial Sequence
  Synthetic
ggaauaaagaagugaugua

SEQ ID NO: 21352 - RNA, 19 nt, Artificial Sequence
  Synthetic
ccacaaauuugauaagcaa

SEQ ID NO: 21353 - RNA, 19 nt, Artificial Sequence
  Synthetic
gaagaaauauggagcaaca

SEQ ID NO: 21354 - RNA, 19 nt, Artificial Sequence
  Synthetic
ccaaggagcuacugcaaau

SEQ ID NO: 21355 - RNA, 19 nt, Artificial Sequence
  Synthetic
gaagaauggauaagaaaga

SEQ ID NO: 21356 - RNA, 19 nt, Artificial Sequence
  Synthetic
ugcagaaacuagugauaua

SEQ ID NO: 21357 - RNA, 19 nt, Artificial Sequence
  Synthetic
cagaagaauggauaagaaa

SEQ ID NO: 21358 - RNA, 19 nt, Artificial Sequence
  Synthetic
uggugcagcuagagaauua

SEQ ID NO: 21359 - RNA, 19 nt, Artificial Sequence
  Synthetic
cagaagaaauauggagcaa

SEQ ID NO: 21360 - RNA, 19 nt, Artificial Sequence
  Synthetic
gguuaaagaacuugcugaa

SEQ ID NO: 21361 - RNA, 19 nt, Artificial Sequence
  Synthetic
gagacaacaacaagacaua

SEQ ID NO: 21362 - RNA, 19 nt, Artificial Sequence
  Synthetic
ucugaauaccauaggauua

SEQ ID NO: 21363 - RNA, 19 nt, Artificial Sequence
  Synthetic
guacaaacucacagauuuu

SEQ ID NO: 21364 - RNA, 19 nt, Artificial Sequence
  Synthetic
cuagagaauuagaagauga

SEQ ID NO: 21365 - RNA, 19 nt, Artificial Sequence
  Synthetic
gcaaaugucuuucguggaa

SEQ ID NO: 21366 - RNA, 19 nt, Artificial Sequence
  Synthetic
ccuggaagcggcagaguua

SEQ ID NO: 21367 - RNA, 19 nt, Artificial Sequence
  Synthetic
ccacuguuauacugggaua

SEQ ID NO: 21368 - RNA, 19 nt, Artificial Sequence
  Synthetic
agacaaagcagaacguaga

SEQ ID NO: 21369 - RNA, 19 nt, Artificial Sequence
  Synthetic
gaaaagaucaucagaagaa

SEQ ID NO: 21370 - RNA, 19 nt, Artificial Sequence
  Synthetic
ucagaagaauggauaagaa

SEQ ID NO: 21371 - RNA, 19 nt, Artificial Sequence
  Synthetic
gagaauuagaagaugauga

SEQ ID NO: 21372 - RNA, 19 nt, Artificial Sequence
  Synthetic
gaaucaucuacgagagaau

SEQ ID NO: 21373 - RNA, 19 nt, Artificial Sequence
  Synthetic
cagaauugccaguaccuua

SEQ ID NO: 21374 - RNA, 19 nt, Artificial Sequence
  Synthetic
acaccaaauuguugagacu

SEQ ID NO: 21375 - RNA, 19 nt, Artificial Sequence
  Synthetic
aguuauuaucgcugacuaa

SEQ ID NO: 21376 - RNA, 19 nt, Artificial Sequence
  Synthetic
cccuaaaacuacugaggaa

SEQ ID NO: 21377 - RNA, 19 nt, Artificial Sequence
  Synthetic
cggcagaguuaggugaaau

SEQ ID NO: 21378 - RNA, 19 nt, Artificial Sequence
  Synthetic
aauuaaaggaagagaugga

SEQ ID NO: 21379 - RNA, 19 nt, Artificial Sequence
  Synthetic
agacagaaguugugaucac

SEQ ID NO: 21380 - RNA, 19 nt, Artificial Sequence
  Synthetic
ccacaaggccagaggagcu

SEQ ID NO: 21381 - RNA, 19 nt, Artificial Sequence
  Synthetic
ggacagcaaucaagcagca

SEQ ID NO: 21382 - RNA, 19 nt, Artificial Sequence
  Synthetic
uagagaagcagguggacca

SEQ ID NO: 21383 - RNA, 19 nt, Artificial Sequence
  Synthetic
gugcauugguggagagcaa

SEQ ID NO: 21384 - RNA, 19 nt, Artificial Sequence
  Synthetic
ccuuagaaauggugauuaa

SEQ ID NO: 21385 - RNA, 19 nt, Artificial Sequence
  Synthetic
uggaguaucuggagagaaa

SEQ ID NO: 21386 - RNA, 19 nt, Artificial Sequence
  Synthetic
guggagagcaagagauaaa

SEQ ID NO: 21387 - RNA, 19 nt, Artificial Sequence
  Synthetic
guaauuacguaacgggaaa

SEQ ID NO: 21388 - RNA, 19 nt, Artificial Sequence
  Synthetic
ugaagaaacuuuuggaaga

SEQ ID NO: 21389 - RNA, 19 nt, Artificial Sequence
  Synthetic
uggaaauagugaagaauga

SEQ ID NO: 21390 - RNA, 19 nt, Artificial Sequence
  Synthetic
cagagaagaaauacagaaa

SEQ ID NO: 21391 - RNA, 19 nt, Artificial Sequence
  Synthetic
gaagauaagugauguguga

SEQ ID NO: 21392 - RNA, 19 nt, Artificial Sequence
  Synthetic
aaucaaagcuauucgggaa

SEQ ID NO: 21393 - RNA, 19 nt, Artificial Sequence
  Synthetic
agauaaagaaggugguuuu

SEQ ID NO: 21394 - RNA, 19 nt, Artificial Sequence
  Synthetic
agagagaggccaagaguau

SEQ ID NO: 21395 - RNA, 19 nt, Artificial Sequence
  Synthetic
guguggaaauagugaagaa

SEQ ID NO: 21396 - RNA, 19 nt, Artificial Sequence
  Synthetic
cgaaguuagugcagcuuua

SEQ ID NO: 21397 - RNA, 19 nt, Artificial Sequence
  Synthetic
gcacaaugcagcaggacuu

SEQ ID NO: 21398 - RNA, 19 nt, Artificial Sequence
  Synthetic
guacaaagucgcaaucaaa

SEQ ID NO: 21399 - RNA, 19 nt, Artificial Sequence
  Synthetic
guacccaguuagugugaaa

SEQ ID NO: 21400 - RNA, 19 nt, Artificial Sequence
  Synthetic
ggaaagaaaucaaacaacu

SEQ ID NO: 21401 - RNA, 19 nt, Artificial Sequence
  Synthetic
aagcuaaagugaugaugaa

SEQ ID NO: 21402 - RNA, 19 nt, Artificial Sequence
  Synthetic
cacuagaagaagaagauaa

SEQ ID NO: 21403 - RNA, 19 nt, Artificial Sequence
  Synthetic
caaauaugccugaagagaa

SEQ ID NO: 21404 - RNA, 19 nt, Artificial Sequence
  Synthetic
ccuuauagcuguuaauuca

SEQ ID NO: 21405 - RNA, 19 nt, Artificial Sequence
  Synthetic
ggaagaaaguaaacugcuu

SEQ ID NO: 21406 - RNA, 19 nt, Artificial Sequence
  Synthetic
gaaggugguuuuaugguaa

SEQ ID NO: 21407 - RNA, 19 nt, Artificial Sequence
  Synthetic
augagaaaugggagauuaa

SEQ ID NO: 21408 - RNA, 19 nt, Artificial Sequence
  Synthetic
gcgcacaauagaugaacua

SEQ ID NO: 21409 - RNA, 19 nt, Artificial Sequence
  Synthetic
guuacugaguucauggaaa

SEQ ID NO: 21410 - RNA, 19 nt, Artificial Sequence
  Synthetic
uuacguaacgggaaagaaa

SEQ ID NO: 21411 - RNA, 19 nt, Artificial Sequence
  Synthetic
cuuacaaaguccaugcuaa

SEQ ID NO: 21412 - RNA, 19 nt, Artificial Sequence
  Synthetic
ggaaauguugccuuagaaa

SEQ ID NO: 21413 - RNA, 19 nt, Artificial Sequence
  Synthetic
gggcaaggaaggagccauu

SEQ ID NO: 21414 - RNA, 19 nt, Artificial Sequence
  Synthetic
gagacuaacacgugcaauu

SEQ ID NO: 21415 - RNA, 19 nt, Artificial Sequence
  Synthetic
gggaagugcagcugaugaa

SEQ ID NO: 21416 - RNA, 19 nt, Artificial Sequence
  Synthetic
cgaaaagauuccuguguau

SEQ ID NO: 21417 - RNA, 19 nt, Artificial Sequence
  Synthetic
gggcaacacacuacgggaa

SEQ ID NO: 21418 - RNA, 19 nt, Artificial Sequence
  Synthetic
aagagaagauggagugcga

SEQ ID NO: 21419 - RNA, 19 nt, Artificial Sequence
  Synthetic
gaucaagcucuuagacaca

SEQ ID NO: 21420 - RNA, 19 nt, Artificial Sequence
  Synthetic
gcaccgacagucagggcaa

SEQ ID NO: 21421 - RNA, 19 nt, Artificial Sequence
  Synthetic
ugagaaggcugaugucuuu

SEQ ID NO: 21422 - RNA, 19 nt, Artificial Sequence
  Synthetic
uggaauggauccuggagca

SEQ ID NO: 21423 - RNA, 19 nt, Artificial Sequence
  Synthetic
ugaacaagcuccccaguaa

SEQ ID NO: 21424 - RNA, 19 nt, Artificial Sequence
  Synthetic
ggcaagucauggugcugaa

SEQ ID NO: 21425 - RNA, 19 nt, Artificial Sequence
  Synthetic
gcugaagagaagauggagu

SEQ ID NO: 21426 - RNA, 19 nt, Artificial Sequence
  Synthetic
cugucuaguccgacgggaa

SEQ ID NO: 21427 - RNA, 19 nt, Artificial Sequence
  Synthetic
cggcugaagagaagaugga

SEQ ID NO: 21428 - RNA, 19 nt, Artificial Sequence
  Synthetic
ccgaaaagauuccugugua

SEQ ID NO: 21429 - RNA, 19 nt, Artificial Sequence
  Synthetic
gcuucuucucugaggucua

SEQ ID NO: 21430 - RNA, 19 nt, Artificial Sequence
  Synthetic
ggggugagcuguaugauga

SEQ ID NO: 21431 - RNA, 19 nt, Artificial Sequence
  Synthetic
ugucuuugccuucgggauu

SEQ ID NO: 21432 - RNA, 19 nt, Artificial Sequence
  Synthetic
aagucauggugcugaagau

SEQ ID NO: 21433 - RNA, 19 nt, Artificial Sequence
  Synthetic
gaucacugaaccagacaca

SEQ ID NO: 21434 - RNA, 19 nt, Artificial Sequence
  Synthetic
agacuaacacgugcaauua

SEQ ID NO: 21435 - RNA, 19 nt, Artificial Sequence
  Synthetic
acuaacacgugcaauuauu

SEQ ID NO: 21436 - RNA, 19 nt, Artificial Sequence
  Synthetic
cagcugugguggugaacuc

SEQ ID NO: 21437 - RNA, 19 nt, Artificial Sequence
  Synthetic
gcucaucgcccgaguaccu

SEQ ID NO: 21438 - RNA, 19 nt, Artificial Sequence
  Synthetic
cccaacauccuaagguuca

SEQ ID NO: 21439 - RNA, 19 nt, Artificial Sequence
  Synthetic
gaaaagauuccuguguaua

SEQ ID NO: 21440 - RNA, 19 nt, Artificial Sequence
  Synthetic
aaucagggcucuguugcaa

SEQ ID NO: 21441 - RNA, 19 nt, Artificial Sequence
  Synthetic
ccaccuggcccuggacauu

SEQ ID NO: 21442 - RNA, 19 nt, Artificial Sequence
  Synthetic
gacccguccucaauaacaa

SEQ ID NO: 21443 - RNA, 19 nt, Artificial Sequence
  Synthetic
gggcaaacaugcugaaaga

SEQ ID NO: 21444 - RNA, 19 nt, Artificial Sequence
  Synthetic
agaugaagcuggucaaaua

SEQ ID NO: 21445 - RNA, 19 nt, Artificial Sequence
  Synthetic
ggucauggcucuuagcuaa

SEQ ID NO: 21446 - RNA, 19 nt, Artificial Sequence
  Synthetic
gauaaagagggaugagaau

SEQ ID NO: 21447 - RNA, 19 nt, Artificial Sequence
  Synthetic
ggaagacccuggaggaaau

SEQ ID NO: 21448 - RNA, 19 nt, Artificial Sequence
  Synthetic
guacagaguuaaagagauc

SEQ ID NO: 21449 - RNA, 19 nt, Artificial Sequence
  Synthetic
gaagagcaggagagggaua

SEQ ID NO: 21450 - RNA, 19 nt, Artificial Sequence
  Synthetic
ggagauggagguagaagaa

SEQ ID NO: 21451 - RNA, 19 nt, Artificial Sequence
  Synthetic
gggaagacccuggaggaaa

SEQ ID NO: 21452 - RNA, 19 nt, Artificial Sequence
  Synthetic
agucucaaguacagaguua

SEQ ID NO: 21453 - RNA, 19 nt, Artificial Sequence
  Synthetic
aggaggugguggaggagaa

SEQ ID NO: 21454 - RNA, 19 nt, Artificial Sequence
  Synthetic
ucucgaagccagucagaua

SEQ ID NO: 21455 - RNA, 19 nt, Artificial Sequence
  Synthetic
aagaagagcaggagaggga

SEQ ID NO: 21456 - RNA, 19 nt, Artificial Sequence
  Synthetic
cugaggagauggagguaga

SEQ ID NO: 21457 - RNA, 19 nt, Artificial Sequence
  Synthetic
ugauaaagagggaugagaa

SEQ ID NO: 21458 - RNA, 19 nt, Artificial Sequence
  Synthetic
ucuaagaacugccugauaa

SEQ ID NO: 21459 - RNA, 19 nt, Artificial Sequence
  Synthetic
ugaaagaaguacagcucau

SEQ ID NO: 21460 - RNA, 19 nt, Artificial Sequence
  Synthetic
caacgagcugugaggguua

SEQ ID NO: 21461 - RNA, 19 nt, Artificial Sequence
  Synthetic
ugaaggaggugguggagga

SEQ ID NO: 21462 - RNA, 19 nt, Artificial Sequence
  Synthetic
ccuuggacugugaggguaa

SEQ ID NO: 21463 - RNA, 19 nt, Artificial Sequence
  Synthetic
caagacauuuucagacuua

SEQ ID NO: 21464 - RNA, 19 nt, Artificial Sequence
  Synthetic
gagaugagcccuauaauga

SEQ ID NO: 21465 - RNA, 19 nt, Artificial Sequence
  Synthetic
gcuccauucuccaggaaga

SEQ ID NO: 21466 - RNA, 19 nt, Artificial Sequence
  Synthetic
gggaaagcaggauggguga

SEQ ID NO: 21467 - RNA, 19 nt, Artificial Sequence
  Synthetic
gagaaggaaaugugagcca

SEQ ID NO: 21468 - RNA, 19 nt, Artificial Sequence
  Synthetic
cuaagaacugccugauaaa

SEQ ID NO: 21469 - RNA, 19 nt, Artificial Sequence
  Synthetic
cagaggaugucuaguucua

SEQ ID NO: 21470 - RNA, 19 nt, Artificial Sequence
  Synthetic
ucucaaguacagaguuaaa

SEQ ID NO: 21471 - RNA, 19 nt, Artificial Sequence
  Synthetic
ugguggaggagaaggaaau

SEQ ID NO: 21472 - RNA, 19 nt, Artificial Sequence
  Synthetic
uuacagagcugcaauaaga

SEQ ID NO: 21473 - RNA, 19 nt, Artificial Sequence
  Synthetic
gaaacagaguaaugaagaa

SEQ ID NO: 21474 - RNA, 19 nt, Artificial Sequence
  Synthetic
cgguaaguauguuuagaaa

SEQ ID NO: 21475 - RNA, 19 nt, Artificial Sequence
  Synthetic
cgugaaagguacauuuaaa

SEQ ID NO: 21476 - RNA, 19 nt, Artificial Sequence
  Synthetic
caggagauuucuauaguua

SEQ ID NO: 21477 - RNA, 19 nt, Artificial Sequence
  Synthetic
ggauaaacccaauacauau

SEQ ID NO: 21478 - RNA, 19 nt, Artificial Sequence
  Synthetic
cuucagacuucuacauuaa

SEQ ID NO: 21479 - RNA, 19 nt, Artificial Sequence
  Synthetic
aggauaaacccaauacaua

SEQ ID NO: 21480 - RNA, 19 nt, Artificial Sequence
  Synthetic
ggacuguggcagaucaaua

SEQ ID NO: 21481 - RNA, 19 nt, Artificial Sequence
  Synthetic
ugacacagcuccagguuuu

SEQ ID NO: 21482 - RNA, 19 nt, Artificial Sequence
  Synthetic
ugcgaagacuugagauuua

SEQ ID NO: 21483 - RNA, 19 nt, Artificial Sequence
  Synthetic
caugaagacccuagcuuua

SEQ ID NO: 21484 - RNA, 19 nt, Artificial Sequence
  Synthetic
caaugguagucuuugguua

SEQ ID NO: 21485 - RNA, 19 nt, Artificial Sequence
  Synthetic
ggagagaggaagagugugu

SEQ ID NO: 21486 - RNA, 19 nt, Artificial Sequence
  Synthetic
ucugaaagaucuagugguu

SEQ ID NO: 21487 - RNA, 19 nt, Artificial Sequence
  Synthetic
ucaaauacauaguggauag

SEQ ID NO: 21488 - RNA, 19 nt, Artificial Sequence
  Synthetic
ucaaaugacugauaagcau

SEQ ID NO: 21489 - RNA, 19 nt, Artificial Sequence
  Synthetic
ccuuggagaugaugucuua

SEQ ID NO: 21490 - RNA, 19 nt, Artificial Sequence
  Synthetic
ggaaacagaguaaugaaga

SEQ ID NO: 21491 - RNA, 19 nt, Artificial Sequence
  Synthetic
acacauugcagaaguaaga

SEQ ID NO: 21492 - RNA, 19 nt, Artificial Sequence
  Synthetic
cagaauggcccuagaguuc

SEQ ID NO: 21493 - RNA, 19 nt, Artificial Sequence
  Synthetic
gacccuagcuuuaagagaa

SEQ ID NO: 21494 - RNA, 19 nt, Artificial Sequence
  Synthetic
agaacacauugcagaagua

SEQ ID NO: 21495 - RNA, 19 nt, Artificial Sequence
  Synthetic
gaaaccagcaggucugaaa

SEQ ID NO: 21496 - RNA, 19 nt, Artificial Sequence
  Synthetic
ccuucagacuucuacauua

SEQ ID NO: 21497 - RNA, 19 nt, Artificial Sequence
  Synthetic
cuagaaaucaaaugacuga

SEQ ID NO: 21498 - RNA, 19 nt, Artificial Sequence
  Synthetic
gaaguaagacaaacaugua

SEQ ID NO: 21499 - RNA, 19 nt, Artificial Sequence
  Synthetic
gaaugaggcuggacagaug

SEQ ID NO: 21500 - RNA, 19 nt, Artificial Sequence
  Synthetic
uaaagaguagugagcaaua

SEQ ID NO: 21501 - RNA, 19 nt, Artificial Sequence
  Synthetic
uaacacacaugcagugaga

SEQ ID NO: 21502 - RNA, 19 nt, Artificial Sequence
  Synthetic
gaggaaaugcuacuaauau

SEQ ID NO: 21503 - RNA, 19 nt, Artificial Sequence
  Synthetic
gaacagaaguuaaggccaa

SEQ ID NO: 21504 - RNA, 19 nt, Artificial Sequence
  Synthetic
ggagaaguuuggagaggaa

SEQ ID NO: 21505 - RNA, 19 nt, Artificial Sequence
  Synthetic
gagaagaaguugcuguuaa

SEQ ID NO: 21506 - RNA, 19 nt, Artificial Sequence
  Synthetic
ugugaagccuugagaguaa

SEQ ID NO: 21507 - RNA, 19 nt, Artificial Sequence
  Synthetic
acaagaaagcauuggcaaa

SEQ ID NO: 21508 - RNA, 19 nt, Artificial Sequence
  Synthetic
agaaguugcuguuaagaua

SEQ ID NO: 21509 - RNA, 19 nt, Artificial Sequence
  Synthetic
caguugaagaaaugagaaa

SEQ ID NO: 21510 - RNA, 19 nt, Artificial Sequence
  Synthetic
ggaaauugcucgacgaugu

SEQ ID NO: 21511 - RNA, 19 nt, Artificial Sequence
  Synthetic
gaguagaauugcugaaagu

SEQ ID NO: 21512 - RNA, 19 nt, Artificial Sequence
  Synthetic
ccuugagaguaauggcuaa

SEQ ID NO: 21513 - RNA, 19 nt, Artificial Sequence
  Synthetic
cugaaagucucuauguuaa

SEQ ID NO: 21514 - RNA, 19 nt, Artificial Sequence
  Synthetic
gggcaaaggaguuggauug

SEQ ID NO: 21515 - RNA, 19 nt, Artificial Sequence
  Synthetic
gagagggaacagaaggaua

SEQ ID NO: 21516 - RNA, 19 nt, Artificial Sequence
  Synthetic
gaguuggauugcugaauua

SEQ ID NO: 21517 - RNA, 19 nt, Artificial Sequence
  Synthetic
aaucaggaccauugcaaua

SEQ ID NO: 21518 - RNA, 19 nt, Artificial Sequence
  Synthetic
cagacaaaguuauacacaa

SEQ ID NO: 21519 - RNA, 19 nt, Artificial Sequence
  Synthetic
ggucuuaacuuuagguaac

SEQ ID NO: 21520 - RNA, 19 nt, Artificial Sequence
  Synthetic
gcugaaagucucuauguua

SEQ ID NO: 21521 - RNA, 19 nt, Artificial Sequence
  Synthetic
cgagauaggccguuuguau

SEQ ID NO: 21522 - RNA, 19 nt, Artificial Sequence
  Synthetic
agaacaauugcgagaacua

SEQ ID NO: 21523 - RNA, 19 nt, Artificial Sequence
  Synthetic
gagaaaaguuguuugugaa

SEQ ID NO: 21524 - RNA, 19 nt, Artificial Sequence
  Synthetic
guggaauucaugaagauua

SEQ ID NO: 21525 - RNA, 19 nt, Artificial Sequence
  Synthetic
ugcgagaacuauuguguua

SEQ ID NO: 21526 - RNA, 19 nt, Artificial Sequence
  Synthetic
caauuuuacuugugugaca

SEQ ID NO: 21527 - RNA, 19 nt, Artificial Sequence
  Synthetic
auuuauagcagcagacaau

SEQ ID NO: 21528 - RNA, 19 nt, Artificial Sequence
  Synthetic
caauaaagacaaugguacu

SEQ ID NO: 21529 - RNA, 19 nt, Artificial Sequence
  Synthetic
ggcuuaguauucugggaaa

SEQ ID NO: 21530 - RNA, 19 nt, Artificial Sequence
  Synthetic
cagcagacaauaaagacaa

SEQ ID NO: 21531 - RNA, 19 nt, Artificial Sequence
  Synthetic
gguacuacguugaaagacu

SEQ ID NO: 21532 - RNA, 19 nt, Artificial Sequence
  Synthetic
agacaaaguuauacacaac

SEQ ID NO: 21533 - RNA, 19 nt, Artificial Sequence
  Synthetic
gaacauaacacuagagaca

SEQ ID NO: 21534 - RNA, 19 nt, Artificial Sequence
  Synthetic
ggagaaagaaugacgagaa

SEQ ID NO: 21535 - RNA, 19 nt, Artificial Sequence
  Synthetic
ccaauauccucgugaagaa

SEQ ID NO: 21536 - RNA, 19 nt, Artificial Sequence
  Synthetic
gaaagaaugacgagaacau

SEQ ID NO: 21537 - RNA, 19 nt, Artificial Sequence
  Synthetic
aggccaagcugaagcagaa

SEQ ID NO: 21538 - RNA, 19 nt, Artificial Sequence
  Synthetic
ucgaaagcaugaaggacaa

SEQ ID NO: 21539 - RNA, 19 nt, Artificial Sequence
  Synthetic
guugagagaucgagggcga

SEQ ID NO: 21540 - RNA, 19 nt, Artificial Sequence
  Synthetic
gaguugaaguugagugagu

SEQ ID NO: 21541 - RNA, 19 nt, Artificial Sequence
  Synthetic
aagaaugacgagaacauaa

SEQ ID NO: 21542 - RNA, 19 nt, Artificial Sequence
  Synthetic
gcuguaaugcagugggaga

SEQ ID NO: 21543 - RNA, 19 nt, Artificial Sequence
  Synthetic
gggaaacaauacuggcuga

SEQ ID NO: 21544 - RNA, 19 nt, Artificial Sequence
  Synthetic
ccaacaacaucaaccacaa

SEQ ID NO: 21545 - RNA, 19 nt, Artificial Sequence
  Synthetic
gagaaagaaugacgagaac

SEQ ID NO: 21546 - RNA, 19 nt, Artificial Sequence
  Synthetic
gugagaagccacaggaagu

SEQ ID NO: 21547 - RNA, 19 nt, Artificial Sequence
  Synthetic
guucagaagucgguuaaua

SEQ ID NO: 21548 - RNA, 19 nt, Artificial Sequence
  Synthetic
gaauauaacaccagcaauc

SEQ ID NO: 21549 - RNA, 19 nt, Artificial Sequence
  Synthetic
gcucuggugcucugggaaa

SEQ ID NO: 21550 - RNA, 19 nt, Artificial Sequence
  Synthetic
ugggagaaguaaaagauua

SEQ ID NO: 21551 - RNA, 19 nt, Artificial Sequence
  Synthetic
acacagagcugcugcccau

SEQ ID NO: 21552 - RNA, 19 nt, Artificial Sequence
  Synthetic
aaacaauacuggcugauca

SEQ ID NO: 21553 - RNA, 19 nt, Artificial Sequence
  Synthetic
acauaacacuagagacagu

SEQ ID NO: 21554 - RNA, 19 nt, Artificial Sequence
  Synthetic
acaucaaucugaagcauga

SEQ ID NO: 21555 - RNA, 19 nt, Artificial Sequence
  Synthetic
gggagaaguaaaagauuau

SEQ ID NO: 21556 - RNA, 19 nt, Artificial Sequence
  Synthetic
ggaagacagagaaggacau

SEQ ID NO: 21557 - RNA, 19 nt, Artificial Sequence
  Synthetic
agacagagaaggacaucuu

SEQ ID NO: 21558 - RNA, 19 nt, Artificial Sequence
  Synthetic
ucuauaaggccaagcugaa

SEQ ID NO: 21559 - RNA, 19 nt, Artificial Sequence
  Synthetic
gucgaaagcaugaaggaca

SEQ ID NO: 21560 - RNA, 19 nt, Artificial Sequence
  Synthetic
augcagugggagaaguaaa

SEQ ID NO: 21561 - RNA, 19 nt, Artificial Sequence
  Synthetic
ccaggaugaauuuggagaa

SEQ ID NO: 21562 - RNA, 19 nt, Artificial Sequence
  Synthetic
gcguuaaccggcagcagaa

SEQ ID NO: 21563 - RNA, 19 nt, Artificial Sequence
  Synthetic
ggaucuggcuggagaggaa

SEQ ID NO: 21564 - RNA, 19 nt, Artificial Sequence
  Synthetic
ggaaugugcuggucggaga

SEQ ID NO: 21565 - RNA, 19 nt, Artificial Sequence
  Synthetic
gagaggagguuuaugugaa

SEQ ID NO: 21566 - RNA, 19 nt, Artificial Sequence
  Synthetic
ccauugagucccugaacua

SEQ ID NO: 21567 - RNA, 19 nt, Artificial Sequence
  Synthetic
ccuuacagccucugacuua

SEQ ID NO: 21568 - RNA, 19 nt, Artificial Sequence
  Synthetic
gugccgagcucuaugaaaa

SEQ ID NO: 21569 - RNA, 19 nt, Artificial Sequence
  Synthetic
cugaagagggccuggauca

SEQ ID NO: 21570 - RNA, 19 nt, Artificial Sequence
  Synthetic
uuaaugaaccugaggccaa

SEQ ID NO: 21571 - RNA, 19 nt, Artificial Sequence
  Synthetic
gggccaugaucaagaagga

SEQ ID NO: 21572 - RNA, 19 nt, Artificial Sequence
  Synthetic
ggacaggccugaggagaca

SEQ ID NO: 21573 - RNA, 19 nt, Artificial Sequence
  Synthetic
aggacgggcugaagaugaa

SEQ ID NO: 21574 - RNA, 19 nt, Artificial Sequence
  Synthetic
ccagauugcgcuacagcua

SEQ ID NO: 21575 - RNA, 19 nt, Artificial Sequence
  Synthetic
ucaaaaugcugaaagagua

SEQ ID NO: 21576 - RNA, 19 nt, Artificial Sequence
  Synthetic
uggagaaggacgaccguau

SEQ ID NO: 21577 - RNA, 19 nt, Artificial Sequence
  Synthetic
ccaucaaaaugcugaaaga

SEQ ID NO: 21578 - RNA, 19 nt, Artificial Sequence
  Synthetic
ccaggaaggccuaugugaa

SEQ ID NO: 21579 - RNA, 19 nt, Artificial Sequence
  Synthetic
gaaccuagccuccaagauu

SEQ ID NO: 21580 - RNA, 19 nt, Artificial Sequence
  Synthetic
gggacagccucuacccuua

SEQ ID NO: 21581 - RNA, 19 nt, Artificial Sequence
  Synthetic
augcaguaccugagugaga

SEQ ID NO: 21582 - RNA, 19 nt, Artificial Sequence
  Synthetic
ccaaguacguuguggaggu

SEQ ID NO: 21583 - RNA, 19 nt, Artificial Sequence
  Synthetic
gcauggagcagccucgaaa

SEQ ID NO: 21584 - RNA, 19 nt, Artificial Sequence
  Synthetic
ggagcaacacaguagaaga

SEQ ID NO: 21585 - RNA, 19 nt, Artificial Sequence
  Synthetic
uguacgagcugaugcguca

SEQ ID NO: 21586 - RNA, 19 nt, Artificial Sequence
  Synthetic
acaaggagaagcagacaga

SEQ ID NO: 21587 - RNA, 19 nt, Artificial Sequence
  Synthetic
ccuccaagauugcagacuu

SEQ ID NO: 21588 - RNA, 19 nt, Artificial Sequence
  Synthetic
ucagggaccuugacacuua

SEQ ID NO: 21589 - RNA, 19 nt, Artificial Sequence
  Synthetic
gagagaaccuagccuccaa

SEQ ID NO: 21590 - RNA, 19 nt, Artificial Sequence
  Synthetic
gcaugcaguaccugaguga

SEQ ID NO: 21591 - RNA, 19 nt, Artificial Sequence
  Synthetic
cuggaaguucugugcaaau

SEQ ID NO: 21592 - RNA, 19 nt, Artificial Sequence
  Synthetic
gugcacaaggagaagcaga

SEQ ID NO: 21593 - RNA, 19 nt, Artificial Sequence
  Synthetic
uggcaaugaugucgggaua

SEQ ID NO: 21594 - RNA, 19 nt, Artificial Sequence
  Synthetic
caauaguucucgaaaguua

SEQ ID NO: 21595 - RNA, 19 nt, Artificial Sequence
  Synthetic
aagaagaaccugaggaaaa

SEQ ID NO: 21596 - RNA, 19 nt, Artificial Sequence
  Synthetic
agugagaagcugaaggaaa

SEQ ID NO: 21597 - RNA, 19 nt, Artificial Sequence
  Synthetic
gcucgaaaauugauagaaa

SEQ ID NO: 21598 - RNA, 19 nt, Artificial Sequence
  Synthetic
ugacagugacucagaaaua

SEQ ID NO: 21599 - RNA, 19 nt, Artificial Sequence
  Synthetic
agacaaagguuaaauccaa

SEQ ID NO: 21600 - RNA, 19 nt, Artificial Sequence
  Synthetic
caacaagagcagagcugaa

SEQ ID NO: 21601 - RNA, 19 nt, Artificial Sequence
  Synthetic
uuaaauaccgugaggcaaa

SEQ ID NO: 21602 - RNA, 19 nt, Artificial Sequence
  Synthetic
agaaaagucaagaggaaaa

SEQ ID NO: 21603 - RNA, 19 nt, Artificial Sequence
  Synthetic
ggagagacgucaucaguau

SEQ ID NO: 21604 - RNA, 19 nt, Artificial Sequence
  Synthetic
cuguggaccuguugaauua

SEQ ID NO: 21605 - RNA, 19 nt, Artificial Sequence
  Synthetic
gguuaaauaccgugaggca

SEQ ID NO: 21606 - RNA, 19 nt, Artificial Sequence
  Synthetic
caaaaguucucgaaaguua

SEQ ID NO: 21607 - RNA, 19 nt, Artificial Sequence
  Synthetic
ugaagaagaaccugaggaa

SEQ ID NO: 21608 - RNA, 19 nt, Artificial Sequence
  Synthetic
auagaaaagucaagaggaa

SEQ ID NO: 21609 - RNA, 19 nt, Artificial Sequence
  Synthetic
gcaaauuauugaacaggau

SEQ ID NO: 21610 - RNA, 19 nt, Artificial Sequence
  Synthetic
ggagaaacgucaauuguca

SEQ ID NO: 21611 - RNA, 19 nt, Artificial Sequence
  Synthetic
gcagugaggagcaagauaa

SEQ ID NO: 21612 - RNA, 19 nt, Artificial Sequence
  Synthetic
gugagaagcugaaggaaag

SEQ ID NO: 21613 - RNA, 19 nt, Artificial Sequence
  Synthetic
uggagaagauggaucacaa

SEQ ID NO: 21614 - RNA, 19 nt, Artificial Sequence
  Synthetic
aaggaaagauggaagggau

SEQ ID NO: 21615 - RNA, 19 nt, Artificial Sequence
  Synthetic
cggaguggcuacagcgaga

SEQ ID NO: 21616 - RNA, 19 nt, Artificial Sequence
  Synthetic
acaaauggccaguguucaa

SEQ ID NO: 21617 - RNA, 19 nt, Artificial Sequence
  Synthetic
ggacuguaacugagaacau

SEQ ID NO: 21618 - RNA, 19 nt, Artificial Sequence
  Synthetic
ccaacaaggaacccagaua

SEQ ID NO: 21619 - RNA, 19 nt, Artificial Sequence
  Synthetic
agaaguugguaucgaaauu

SEQ ID NO: 21620 - RNA, 19 nt, Artificial Sequence
  Synthetic
caaccuaaauucagccaau

SEQ ID NO: 21621 - RNA, 19 nt, Artificial Sequence
  Synthetic
gcaccaaguucccagcuua

SEQ ID NO: 21622 - RNA, 19 nt, Artificial Sequence
  Synthetic
gcugauauagcaauggaaa

SEQ ID NO: 21623 - RNA, 19 nt, Artificial Sequence
  Synthetic
ggaaaugccucgagccaua

SEQ ID NO: 21624 - RNA, 19 nt, Artificial Sequence
  Synthetic
gggaagaggagaaggucau

SEQ ID NO: 21625 - RNA, 19 nt, Artificial Sequence
  Synthetic
gcagaaaacaagagaaaga

SEQ ID NO: 21626 - RNA, 19 nt, Artificial Sequence
  Synthetic
uggaauaccuggaagcaau

SEQ ID NO: 21627 - RNA, 19 nt, Artificial Sequence
  Synthetic
ccgauaaagaacaggaaaa

SEQ ID NO: 21628 - RNA, 19 nt, Artificial Sequence
  Synthetic
ggaauuugaagcucagaaa

SEQ ID NO: 21629 - RNA, 19 nt, Artificial Sequence
  Synthetic
ccauagagccugaaaucau

SEQ ID NO: 21630 - RNA, 19 nt, Artificial Sequence
  Synthetic
guuagaacucuuugaacaa

SEQ ID NO: 21631 - RNA, 19 nt, Artificial Sequence
  Synthetic
guuacaacucuuugaacaa

SEQ ID NO: 21632 - RNA, 19 nt, Artificial Sequence
  Synthetic
ccagagaaucggaagcauu

SEQ ID NO: 21633 - RNA, 19 nt, Artificial Sequence
  Synthetic
ugaucugugucgagggcaa

SEQ ID NO: 21634 - RNA, 19 nt, Artificial Sequence
  Synthetic
aagaagagaugcagggaag

SEQ ID NO: 21635 - RNA, 19 nt, Artificial Sequence
  Synthetic
acuuguuaccagagguuaa

SEQ ID NO: 21636 - RNA, 19 nt, Artificial Sequence
  Synthetic
gcaaauaaaggcucuggaa

SEQ ID NO: 21637 - RNA, 19 nt, Artificial Sequence
  Synthetic
cggaaugguuugacuggau

SEQ ID NO: 21638 - RNA, 19 nt, Artificial Sequence
  Synthetic
gaugcagggaagaggagaa

SEQ ID NO: 21639 - RNA, 19 nt, Artificial Sequence
  Synthetic
gacuggaucuugaggaaca

SEQ ID NO: 21640 - RNA, 19 nt, Artificial Sequence
  Synthetic
caauauugcaagugggaag

SEQ ID NO: 21641 - RNA, 19 nt, Artificial Sequence
  Synthetic
ugauuaagguccugcuuga

SEQ ID NO: 21642 - RNA, 19 nt, Artificial Sequence
  Synthetic
ccucguggguaaaugacaa

SEQ ID NO: 21643 - RNA, 19 nt, Artificial Sequence
  Synthetic
gcucuuggaauuacugaaa

SEQ ID NO: 21644 - RNA, 19 nt, Artificial Sequence
  Synthetic
gugcggagcugauaacauu

SEQ ID NO: 21645 - RNA, 19 nt, Artificial Sequence
  Synthetic
aaaucgggaucgaauauua

SEQ ID NO: 21646 - RNA, 19 nt, Artificial Sequence
  Synthetic
gaauauuaacuccagagaa

SEQ ID NO: 21647 - RNA, 19 nt, Artificial Sequence
  Synthetic
cgacaugccuggaauucuu

SEQ ID NO: 21648 - RNA, 19 nt, Artificial Sequence
  Synthetic
uaccagagguuaaagaaga

SEQ ID NO: 21649 - RNA, 19 nt, Artificial Sequence
  Synthetic
gcaagugggaagacgacau

SEQ ID NO: 21650 - RNA, 19 nt, Artificial Sequence
  Synthetic
uugacuggaucuugaggaa

SEQ ID NO: 21651 - RNA, 19 nt, Artificial Sequence
  Synthetic
gaaaguugggauuugcaaa

SEQ ID NO: 21652 - RNA, 19 nt, Artificial Sequence
  Synthetic
aaagaagagaugcagggaa

SEQ ID NO: 21653 - RNA, 19 nt, Artificial Sequence
  Synthetic
gcaaauagaugaacaacaa

SEQ ID NO: 21654 - RNA, 19 nt, Artificial Sequence
  Synthetic
gcuaaagccucaacaaaua

SEQ ID NO: 21655 - RNA, 19 nt, Artificial Sequence
  Synthetic
ugacaaagaaucagagaca

SEQ ID NO: 21656 - RNA, 19 nt, Artificial Sequence
  Synthetic
aggcagaacuugaacguuu

SEQ ID NO: 21657 - RNA, 19 nt, Artificial Sequence
  Synthetic
ggaagauauugaaaggcaa

SEQ ID NO: 21658 - RNA, 19 nt, Artificial Sequence
  Synthetic
agagaugagaagaaagaaa

SEQ ID NO: 21659 - RNA, 19 nt, Artificial Sequence
  Synthetic
agucagaaaucuucacaua

SEQ ID NO: 21660 - RNA, 19 nt, Artificial Sequence
  Synthetic
gaucaaauucuucaggaaa

SEQ ID NO: 21661 - RNA, 19 nt, Artificial Sequence
  Synthetic
gcagaaaaccagaaugaaa

SEQ ID NO: 21662 - RNA, 19 nt, Artificial Sequence
  Synthetic
gaaccaaaacaaaggaaaa

SEQ ID NO: 21663 - RNA, 19 nt, Artificial Sequence
  Synthetic
gagagaggaucauggacaa

SEQ ID NO: 21664 - RNA, 19 nt, Artificial Sequence
  Synthetic
gcuaaagccacaacaaaua

SEQ ID NO: 21665 - RNA, 19 nt, Artificial Sequence
  Synthetic
caaguuaaugucagagaaa

SEQ ID NO: 21666 - RNA, 19 nt, Artificial Sequence
  Synthetic
ggagagaugagaagaaaga

SEQ ID NO: 21667 - RNA, 19 nt, Artificial Sequence
  Synthetic
agucaauggagcagagaau

SEQ ID NO: 21668 - RNA, 19 nt, Artificial Sequence
  Synthetic
aaggaaacuucuagccaaa

SEQ ID NO: 21669 - RNA, 19 nt, Artificial Sequence
  Synthetic
gaagauauugaaaggcaaa

SEQ ID NO: 21670 - RNA, 19 nt, Artificial Sequence
  Synthetic
gagaagaaacaaucggaau

SEQ ID NO: 21671 - RNA, 19 nt, Artificial Sequence
  Synthetic
aggcagaaauccaggcaga

SEQ ID NO: 21672 - RNA, 19 nt, Artificial Sequence
  Synthetic
aguuaaugucagagaaaga

SEQ ID NO: 21673 - RNA, 19 nt, Artificial Sequence
  Synthetic
gggaagauauugaaaggca

SEQ ID NO: 21674 - RNA, 19 nt, Artificial Sequence
  Synthetic
ggaauaccauguuaagaua

SEQ ID NO: 21675 - RNA, 19 nt, Artificial Sequence
  Synthetic
gauuauuucuccuuggaua

SEQ ID NO: 21676 - RNA, 19 nt, Artificial Sequence
  Synthetic
ccacaaaauuagcgacuau

SEQ ID NO: 21677 - RNA, 19 nt, Artificial Sequence
  Synthetic
acaaauaacgaaagcucua

SEQ ID NO: 21678 - RNA, 19 nt, Artificial Sequence
  Synthetic
uugcaguguuggagcuaaa

SEQ ID NO: 21679 - RNA, 19 nt, Artificial Sequence
  Synthetic
gagcuaaagccucaacaaa

SEQ ID NO: 21680 - RNA, 19 nt, Artificial Sequence
  Synthetic
cugcagagaguauagaaua

SEQ ID NO: 21681 - RNA, 19 nt, Artificial Sequence
  Synthetic
agaucaaauucuucaggaa

SEQ ID NO: 21682 - RNA, 19 nt, Artificial Sequence
  Synthetic
ccaaaguagcaguggaagu

SEQ ID NO: 21683 - RNA, 19 nt, Artificial Sequence
  Synthetic
gggaagagauagaaagaca

SEQ ID NO: 21684 - RNA, 19 nt, Artificial Sequence
  Synthetic
gggaagaauagaugauuua

SEQ ID NO: 21685 - RNA, 19 nt, Artificial Sequence
  Synthetic
cagaaaugauggaagaauu

SEQ ID NO: 21686 - RNA, 19 nt, Artificial Sequence
  Synthetic
gauagaaagacaacggaaa

SEQ ID NO: 21687 - RNA, 19 nt, Artificial Sequence
  Synthetic
aggcagagcuggagagacu

SEQ ID NO: 21688 - RNA, 19 nt, Artificial Sequence
  Synthetic
gcaaaagaugcuagagaaa

SEQ ID NO: 21689 - RNA, 19 nt, Artificial Sequence
  Synthetic
uagaauacugugagggaaa

SEQ ID NO: 21690 - RNA, 19 nt, Artificial Sequence
  Synthetic
cagcagaaaugauggaaga

SEQ ID NO: 21691 - RNA, 19 nt, Artificial Sequence
  Synthetic
gaagaaggagggaagaaua

SEQ ID NO: 21692 - RNA, 19 nt, Artificial Sequence
  Synthetic
ugaaacuagccaagggaaa

SEQ ID NO: 21693 - RNA, 19 nt, Artificial Sequence
  Synthetic
aagauggcguguagagaua

SEQ ID NO: 21694 - RNA, 19 nt, Artificial Sequence
  Synthetic
aguagagacucccgagaaa

SEQ ID NO: 21695 - RNA, 19 nt, Artificial Sequence
  Synthetic
gagcagaaacagcggaaaa

SEQ ID NO: 21696 - RNA, 19 nt, Artificial Sequence
  Synthetic
ggacaaagaaugagguuag

SEQ ID NO: 21697 - RNA, 19 nt, Artificial Sequence
  Synthetic
acaaauuaaugucggagaa

SEQ ID NO: 21698 - RNA, 19 nt, Artificial Sequence
  Synthetic
gcagauugaugaacagcaa

SEQ ID NO: 21699 - RNA, 19 nt, Artificial Sequence
  Synthetic
ccaccaaagaucucaaaua

SEQ ID NO: 21700 - RNA, 19 nt, Artificial Sequence
  Synthetic
caccaaagaucucaaauaa

SEQ ID NO: 21701 - RNA, 19 nt, Artificial Sequence
  Synthetic
aagcaugcauguagggaau

SEQ ID NO: 21702 - RNA, 19 nt, Artificial Sequence
  Synthetic
ggauaaauucacagaggga

SEQ ID NO: 21703 - RNA, 19 nt, Artificial Sequence
  Synthetic
gcaagaaacuccuuauaga

SEQ ID NO: 21704 - RNA, 19 nt, Artificial Sequence
  Synthetic
ccagaauaguuaagcugua

SEQ ID NO: 21705 - RNA, 19 nt, Artificial Sequence
  Synthetic
aagcagagauccaggcaga

SEQ ID NO: 21706 - RNA, 19 nt, Artificial Sequence
  Synthetic
ugauaaagaaguagagacu

SEQ ID NO: 21707 - RNA, 19 nt, Artificial Sequence
  Synthetic
aauuaaugucggagaaaga

SEQ ID NO: 21708 - RNA, 19 nt, Artificial Sequence
  Synthetic
cguuaacguuagcagaaua

SEQ ID NO: 21709 - RNA, 19 nt, Artificial Sequence
  Synthetic
ccucaaaccagguaauauu

SEQ ID NO: 21710 - RNA, 19 nt, Artificial Sequence
  Synthetic
agaaauacaaggaacgauu

SEQ ID NO: 21711 - RNA, 19 nt, Artificial Sequence
  Synthetic
caacaggaaaggauaaauu

SEQ ID NO: 21712 - RNA, 19 nt, Artificial Sequence
  Synthetic
gagaagaaggagggaagaa

SEQ ID NO: 21713 - RNA, 19 nt, Artificial Sequence
  Synthetic
aggaagaagaggaggagaa

SEQ ID NO: 21714 - RNA, 19 nt, Artificial Sequence
  Synthetic
guacaguggaagugaggaa

SEQ ID NO: 21715 - RNA, 19 nt, Artificial Sequence
  Synthetic
gggagaaugaggagcacaa

SEQ ID NO: 21716 - RNA, 19 nt, Artificial Sequence
  Synthetic
ccagaagaauccagggaca

SEQ ID NO: 21717 - RNA, 19 nt, Artificial Sequence
  Synthetic
gaguaugaguacaguggaa

SEQ ID NO: 21718 - RNA, 19 nt, Artificial Sequence
  Synthetic
gggaugaagaggaagaaau

SEQ ID NO: 21719 - RNA, 19 nt, Artificial Sequence
  Synthetic
cagaaagacugcagaggca

SEQ ID NO: 21720 - RNA, 19 nt, Artificial Sequence
  Synthetic
ugguggaacuuguuggaaa

SEQ ID NO: 21721 - RNA, 19 nt, Artificial Sequence
  Synthetic
ccgaagugggcaaggcaaa

SEQ ID NO: 21722 - RNA, 19 nt, Artificial Sequence
  Synthetic
gguggaacuuguuggaaau

SEQ ID NO: 21723 - RNA, 19 nt, Artificial Sequence
  Synthetic
cggcaguauuucaagagaa

SEQ ID NO: 21724 - RNA, 19 nt, Artificial Sequence
  Synthetic
gcauagauggagacagaaa

SEQ ID NO: 21725 - RNA, 19 nt, Artificial Sequence
  Synthetic
aagcauagauggagacaga

SEQ ID NO: 21726 - RNA, 19 nt, Artificial Sequence
  Synthetic
gagacagaaagaaggcaaa

SEQ ID NO: 21727 - RNA, 19 nt, Artificial Sequence
  Synthetic
ggagacagaaagaaggcaa

SEQ ID NO: 21728 - RNA, 19 nt, Artificial Sequence
  Synthetic
ccaaguggaaccagaacaa

SEQ ID NO: 21729 - RNA, 19 nt, Artificial Sequence
  Synthetic
gggccuaagucuaagaacu

SEQ ID NO: 21730 - RNA, 19 nt, Artificial Sequence
  Synthetic
caggaagcauagauggaga

SEQ ID NO: 21731 - RNA, 19 nt, Artificial Sequence
  Synthetic
ggagaggaugaaaggcauu

SEQ ID NO: 21732 - RNA, 19 nt, Artificial Sequence
  Synthetic
ccugaguugcagaggaaga

SEQ ID NO: 21733 - RNA, 19 nt, Artificial Sequence
  Synthetic
uggauuaugagauggacua

SEQ ID NO: 21734 - RNA, 19 nt, Artificial Sequence
  Synthetic
ccaucaagguggcugacuu

SEQ ID NO: 21735 - RNA, 19 nt, Artificial Sequence
  Synthetic
gaguugcagaggaagauua

SEQ ID NO: 21736 - RNA, 19 nt, Artificial Sequence
  Synthetic
ggcgcauccuggagcauua

SEQ ID NO: 21737 - RNA, 19 nt, Artificial Sequence
  Synthetic
cggcagugacgcugacaga

SEQ ID NO: 21738 - RNA, 19 nt, Artificial Sequence
  Synthetic
gaaaagagcuacuauacau

SEQ ID NO: 21739 - RNA, 19 nt, Artificial Sequence
  Synthetic
ggaccaaguggaaccagaa

SEQ ID NO: 21740 - RNA, 19 nt, Artificial Sequence
  Synthetic
ggacuuccugcgagaggua

SEQ ID NO: 21741 - RNA, 19 nt, Artificial Sequence
  Synthetic
cugaggaccuggacggcau

SEQ ID NO: 21742 - RNA, 19 nt, Artificial Sequence
  Synthetic
uuguaaagccugaggaccu

SEQ ID NO: 21743 - RNA, 19 nt, Artificial Sequence
  Synthetic
agaacugggucuacaagau

SEQ ID NO: 21744 - RNA, 19 nt, Artificial Sequence
  Synthetic
guucugggccuaagucuaa

SEQ ID NO: 21745 - RNA, 19 nt, Artificial Sequence
  Synthetic
ccacaaucuggaaggacca

SEQ ID NO: 21746 - RNA, 19 nt, Artificial Sequence
  Synthetic
ccacuacauucucaaacaa

SEQ ID NO: 21747 - RNA, 19 nt, Artificial Sequence
  Synthetic
cuggagaggaugaaaggca

SEQ ID NO: 21748 - RNA, 19 nt, Artificial Sequence
  Synthetic
uggagaggaugaaaggcau

SEQ ID NO: 21749 - RNA, 19 nt, Artificial Sequence
  Synthetic
ugaaauucgacaagccaga

SEQ ID NO: 21750 - RNA, 19 nt, Artificial Sequence
  Synthetic
ucggaagcauguuguguga

SEQ ID NO: 21751 - RNA, 19 nt, Artificial Sequence
  Synthetic
auagauggagacagaaaga

SEQ ID NO: 21752 - RNA, 19 nt, Artificial Sequence
  Synthetic
gagcauuaccagugggacc

SEQ ID NO: 21753 - RNA, 19 nt, Artificial Sequence
  Synthetic
uaguauggauuaugagaug

SEQ ID NO: 21754 - RNA, 19 nt, Artificial Sequence
  Synthetic
gcucugugucugugggaaa

SEQ ID NO: 21755 - RNA, 19 nt, Artificial Sequence
  Synthetic
uggugaaguuggagauaga

SEQ ID NO: 21756 - RNA, 19 nt, Artificial Sequence
  Synthetic
cugacagaacuaaggaaua

SEQ ID NO: 21757 - RNA, 19 nt, Artificial Sequence
  Synthetic
ugugaaugcucaagauaau

SEQ ID NO: 21758 - RNA, 19 nt, Artificial Sequence
  Synthetic
gaaaguauauaaaggacga

SEQ ID NO: 21759 - RNA, 19 nt, Artificial Sequence
  Synthetic
augaagacaacaugacaaa

SEQ ID NO: 21760 - RNA, 19 nt, Artificial Sequence
  Synthetic
ccgaaauaguagcagcuuu

SEQ ID NO: 21761 - RNA, 19 nt, Artificial Sequence
  Synthetic
uggcaagagcauugaccua

SEQ ID NO: 21762 - RNA, 19 nt, Artificial Sequence
  Synthetic
uguaaauguaaguggugaa

SEQ ID NO: 21763 - RNA, 19 nt, Artificial Sequence
  Synthetic
auauacagcagguuggaua

SEQ ID NO: 21764 - RNA, 19 nt, Artificial Sequence
  Synthetic
cauccaaauaucaggaaca

SEQ ID NO: 21765 - RNA, 19 nt, Artificial Sequence
  Synthetic
ggaaauucucacuggcgaa

SEQ ID NO: 21766 - RNA, 19 nt, Artificial Sequence
  Synthetic
aggacgaugcagaaauaaa

SEQ ID NO: 21767 - RNA, 19 nt, Artificial Sequence
  Synthetic
gcagcaaagcagaugugaa

SEQ ID NO: 21768 - RNA, 19 nt, Artificial Sequence
  Synthetic
auacacacccauugacaaa

SEQ ID NO: 21769 - RNA, 19 nt, Artificial Sequence
  Synthetic
gaauauggcaagaggguua

SEQ ID NO: 21770 - RNA, 19 nt, Artificial Sequence
  Synthetic
gcuauaagcacuuggaauu

SEQ ID NO: 21771 - RNA, 19 nt, Artificial Sequence
  Synthetic
ggccuuacuuugugggaaa

SEQ ID NO: 21772 - RNA, 19 nt, Artificial Sequence
  Synthetic
ccaaagaagcuguggagga

SEQ ID NO: 21773 - RNA, 19 nt, Artificial Sequence
  Synthetic
gaaucauaccagaaaguaa

SEQ ID NO: 21774 - RNA, 19 nt, Artificial Sequence
  Synthetic
gaaacuagcuacauaagua

SEQ ID NO: 21775 - RNA, 19 nt, Artificial Sequence
  Synthetic
gcuguaaacuguaacauua

SEQ ID NO: 21776 - RNA, 19 nt, Artificial Sequence
  Synthetic
aagaguagcuccuuggaua

SEQ ID NO: 21777 - RNA, 19 nt, Artificial Sequence
  Synthetic
ccaagcaaauuaucagaaa

SEQ ID NO: 21778 - RNA, 19 nt, Artificial Sequence
  Synthetic
ggcaagaggguuaaaguau

SEQ ID NO: 21779 - RNA, 19 nt, Artificial Sequence
  Synthetic
gaccauaguuucuuguuaa

SEQ ID NO: 21780 - RNA, 19 nt, Artificial Sequence
  Synthetic
aagaagcuguggaggagaa

SEQ ID NO: 21781 - RNA, 19 nt, Artificial Sequence
  Synthetic
ggaaacagaugucuaguga

SEQ ID NO: 21782 - RNA, 19 nt, Artificial Sequence
  Synthetic
ggaagaacuggaugaauca

SEQ ID NO: 21783 - RNA, 19 nt, Artificial Sequence
  Synthetic
ggaggagaaugguguuauu

SEQ ID NO: 21784 - RNA, 19 nt, Artificial Sequence
  Synthetic
uggaagaacuggaugaauc

SEQ ID NO: 21785 - RNA, 19 nt, Artificial Sequence
  Synthetic
gcacuaaugaagacccuaa

SEQ ID NO: 21786 - RNA, 19 nt, Artificial Sequence
  Synthetic
gacuaauggaugaagcuaa

SEQ ID NO: 21787 - RNA, 19 nt, Artificial Sequence
  Synthetic
ggaccauaguuucuuguua

SEQ ID NO: 21788 - RNA, 19 nt, Artificial Sequence
  Synthetic
gguuaaaguaucugcacca

SEQ ID NO: 21789 - RNA, 19 nt, Artificial Sequence
  Synthetic
caauggaagggaucaguaa

SEQ ID NO: 21790 - RNA, 19 nt, Artificial Sequence
  Synthetic
gaucaguaauuucaagaca

SEQ ID NO: 21791 - RNA, 19 nt, Artificial Sequence
  Synthetic
cugacaaggcagacauauu

SEQ ID NO: 21792 - RNA, 19 nt, Artificial Sequence
  Synthetic
aaacagaugucuagugauc

SEQ ID NO: 21793 - RNA, 19 nt, Artificial Sequence
  Synthetic
agaaacugcuucauggaga

SEQ ID NO: 21794 - RNA, 19 nt, Artificial Sequence
  Synthetic
gguacuuggccacgacuua

SEQ ID NO: 21795 - RNA, 19 nt, Artificial Sequence
  Synthetic
uggcaagaggguuaaagua

SEQ ID NO: 21796 - RNA, 19 nt, Artificial Sequence
  Synthetic
caaaugaugaugaugauga

SEQ ID NO: 21797 - RNA, 19 nt, Artificial Sequence
  Synthetic
gaagaacgauauaaagcca

SEQ ID NO: 21798 - RNA, 19 nt, Artificial Sequence
  Synthetic
ugacuuaauagaagaacga

SEQ ID NO: 21799 - RNA, 19 nt, Artificial Sequence
  Synthetic
agaggaaacuuaagcauaa

SEQ ID NO: 21800 - RNA, 19 nt, Artificial Sequence
  Synthetic
agcaauagguggaaagaga

SEQ ID NO: 21801 - RNA, 19 nt, Artificial Sequence
  Synthetic
agagaaaugaugugaaaga

SEQ ID NO: 21802 - RNA, 19 nt, Artificial Sequence
  Synthetic
gaccggaaguugaggcuua

SEQ ID NO: 21803 - RNA, 19 nt, Artificial Sequence
  Synthetic
ccuuaaaugucuaacaaca

SEQ ID NO: 21804 - RNA, 19 nt, Artificial Sequence
  Synthetic
guucauugcucaacaagaa

SEQ ID NO: 21805 - RNA, 19 nt, Artificial Sequence
  Synthetic
ugggaaagauacaugcuaa

SEQ ID NO: 21806 - RNA, 19 nt, Artificial Sequence
  Synthetic
acuuaaagguugaugugau

SEQ ID NO: 21807 - RNA, 19 nt, Artificial Sequence
  Synthetic
agaaagcugugcagaggaa

SEQ ID NO: 21808 - RNA, 19 nt, Artificial Sequence
  Synthetic
guuggaaccuaaugggaau

SEQ ID NO: 21809 - RNA, 19 nt, Artificial Sequence
  Synthetic
cagaggaaacuuaagcaua

SEQ ID NO: 21810 - RNA, 19 nt, Artificial Sequence
  Synthetic
ccaaaagaagauagaagaa

SEQ ID NO: 21811 - RNA, 19 nt, Artificial Sequence
  Synthetic
acacuggaauggaggguga

SEQ ID NO: 21812 - RNA, 19 nt, Artificial Sequence
  Synthetic
agagaaaacuguugagguu

SEQ ID NO: 21813 - RNA, 19 nt, Artificial Sequence
  Synthetic
uauaguagugggaaagaua

SEQ ID NO: 21814 - RNA, 19 nt, Artificial Sequence
  Synthetic
gagaauacuaugcuacuaa

SEQ ID NO: 21815 - RNA, 19 nt, Artificial Sequence
  Synthetic
gauuauggcaucugugaau

SEQ ID NO: 21816 - RNA, 19 nt, Artificial Sequence
  Synthetic
ucaccgaaggagagagaga

SEQ ID NO: 21817 - RNA, 19 nt, Artificial Sequence
  Synthetic
accgaaggagagagagaaa

SEQ ID NO: 21818 - RNA, 19 nt, Artificial Sequence
  Synthetic
ggagagagagaaagcuuuu

SEQ ID NO: 21819 - RNA, 19 nt, Artificial Sequence
  Synthetic
cugauaauacacacaguua

SEQ ID NO: 21820 - RNA, 19 nt, Artificial Sequence
  Synthetic
cagguugucuguagagaau

SEQ ID NO: 21821 - RNA, 19 nt, Artificial Sequence
  Synthetic
ccacugggaauuugaagua

SEQ ID NO: 21822 - RNA, 19 nt, Artificial Sequence
  Synthetic
gaaagagaaaugaugugaa

SEQ ID NO: 21823 - RNA, 19 nt, Artificial Sequence
  Synthetic
ugaauucguuucugacaua

SEQ ID NO: 21824 - RNA, 19 nt, Artificial Sequence
  Synthetic
cugaauucaucaauggaga

SEQ ID NO: 21825 - RNA, 19 nt, Artificial Sequence
  Synthetic
gaaaauguuaccaguguua

SEQ ID NO: 21826 - RNA, 19 nt, Artificial Sequence
  Synthetic
gaaagauacaugcuaagaa

SEQ ID NO: 21827 - RNA, 19 nt, Artificial Sequence
  Synthetic
gaacgauucaccuggguuu

SEQ ID NO: 21828 - RNA, 19 nt, Artificial Sequence
  Synthetic
gcaauagguggaaagagaa

SEQ ID NO: 21829 - RNA, 19 nt, Artificial Sequence
  Synthetic
ccaaagggcuccagcuaua

SEQ ID NO: 21830 - RNA, 19 nt, Artificial Sequence
  Synthetic
agguaaaacaggagauaaa

SEQ ID NO: 21831 - RNA, 19 nt, Artificial Sequence
  Synthetic
gcgggaaggcagauggaaa

SEQ ID NO: 21832 - RNA, 19 nt, Artificial Sequence
  Synthetic
gaguaucaacggaaagaaa

SEQ ID NO: 21833 - RNA, 19 nt, Artificial Sequence
  Synthetic
gagaagagcaagaaagguu

SEQ ID NO: 21834 - RNA, 19 nt, Artificial Sequence
  Synthetic
gcacugaaggagaaugaaa

SEQ ID NO: 21835 - RNA, 19 nt, Artificial Sequence
  Synthetic
ggacaucaaucaagucuua

SEQ ID NO: 21836 - RNA, 19 nt, Artificial Sequence
  Synthetic
caaucaagucuuagaaaca

SEQ ID NO: 21837 - RNA, 19 nt, Artificial Sequence
  Synthetic
caugaagagaauagaagaa

SEQ ID NO: 21838 - RNA, 19 nt, Artificial Sequence
  Synthetic
ccaaggauauucugggcaa

SEQ ID NO: 21839 - RNA, 19 nt, Artificial Sequence
  Synthetic
gcauugugguggagggcuu

SEQ ID NO: 21840 - RNA, 19 nt, Artificial Sequence
  Synthetic
gguuuggaguguucagaua

SEQ ID NO: 21841 - RNA, 19 nt, Artificial Sequence
  Synthetic
ucacaaagcuacccgcaaa

SEQ ID NO: 21842 - RNA, 19 nt, Artificial Sequence
  Synthetic
ccucguaaacccaaggaua

SEQ ID NO: 21843 - RNA, 19 nt, Artificial Sequence
  Synthetic
ccaucacaauagcgagaua

SEQ ID NO: 21844 - RNA, 19 nt, Artificial Sequence
  Synthetic
gaagagaggacucggguca

SEQ ID NO: 21845 - RNA, 19 nt, Artificial Sequence
  Synthetic
cugaaauuauccuggguga

SEQ ID NO: 21846 - RNA, 19 nt, Artificial Sequence
  Synthetic
ggaacaaaacccaggauuu

SEQ ID NO: 21847 - RNA, 19 nt, Artificial Sequence
  Synthetic
acgucaacauggaagagaa

SEQ ID NO: 21848 - RNA, 19 nt, Artificial Sequence
  Synthetic
ggaaauucaucuuuaagga

SEQ ID NO: 21849 - RNA, 19 nt, Artificial Sequence
  Synthetic
gggucaagcuggaaagccu

SEQ ID NO: 21850 - RNA, 19 nt, Artificial Sequence
  Synthetic
guucaacauuccagagacu

SEQ ID NO: 21851 - RNA, 19 nt, Artificial Sequence
  Synthetic
gauaagagguacagagauu

SEQ ID NO: 21852 - RNA, 19 nt, Artificial Sequence
  Synthetic
ggaauaugaucgaggaaca

SEQ ID NO: 21853 - RNA, 19 nt, Artificial Sequence
  Synthetic
ccagauaacugcaaagcaa

SEQ ID NO: 21854 - RNA, 19 nt, Artificial Sequence
  Synthetic
gcuaugugguugagggcua

SEQ ID NO: 21855 - RNA, 19 nt, Artificial Sequence
  Synthetic
gcugauggcuuuugugaaa

SEQ ID NO: 21856 - RNA, 19 nt, Artificial Sequence
  Synthetic
ggaaggaaagggagagauu

SEQ ID NO: 21857 - RNA, 19 nt, Artificial Sequence
  Synthetic
ugaagaagaaggugauuaa

SEQ ID NO: 21858 - RNA, 19 nt, Artificial Sequence
  Synthetic
aaggaaagggagagauuaa

SEQ ID NO: 21859 - RNA, 19 nt, Artificial Sequence
  Synthetic
uggcagaaacagaggacua

SEQ ID NO: 21860 - RNA, 19 nt, Artificial Sequence
  Synthetic
gcauggaaauggagggcau

SEQ ID NO: 21861 - RNA, 19 nt, Artificial Sequence
  Synthetic
gcagaaacgucaugaagau

SEQ ID NO: 21862 - RNA, 19 nt, Artificial Sequence
  Synthetic
guacauagcuuauugucaa

SEQ ID NO: 21863 - RNA, 19 nt, Artificial Sequence
  Synthetic
gauacguaccugugggaaa

SEQ ID NO: 21864 - RNA, 19 nt, Artificial Sequence
  Synthetic
gagugaagcuauugauaca

SEQ ID NO: 21865 - RNA, 19 nt, Artificial Sequence
  Synthetic
ugaaagagcacgaggaguu

SEQ ID NO: 21866 - RNA, 19 nt, Artificial Sequence
  Synthetic
ugaagaagcuggcgcacaa

SEQ ID NO: 21867 - RNA, 19 nt, Artificial Sequence
  Synthetic
agaacaggguauugcauua

SEQ ID NO: 21868 - RNA, 19 nt, Artificial Sequence
  Synthetic
guaugaacguguauguaaa

SEQ ID NO: 21869 - RNA, 19 nt, Artificial Sequence
  Synthetic
cagacaaguuucagaugua

SEQ ID NO: 21870 - RNA, 19 nt, Artificial Sequence
  Synthetic
cgaccuauccguagcauua

SEQ ID NO: 21871 - RNA, 19 nt, Artificial Sequence
  Synthetic
cagcgaaccacuugauaaa

SEQ ID NO: 21872 - RNA, 19 nt, Artificial Sequence
  Synthetic
ccgaaaaguauaugagcaa

SEQ ID NO: 21873 - RNA, 19 nt, Artificial Sequence
  Synthetic
cgucagugcaauugaggaa

SEQ ID NO: 21874 - RNA, 19 nt, Artificial Sequence
  Synthetic
ugaaggaggaugagaucaa

SEQ ID NO: 21875 - RNA, 19 nt, Artificial Sequence
  Synthetic
gugcagucaucguggagaa

SEQ ID NO: 21876 - RNA, 19 nt, Artificial Sequence
  Synthetic
accuaaagccugagaauau

SEQ ID NO: 21877 - RNA, 19 nt, Artificial Sequence
  Synthetic
ccagcaugccauugagaaa

SEQ ID NO: 21878 - RNA, 19 nt, Artificial Sequence
  Synthetic
cugaugacaugaaaggaaa

SEQ ID NO: 21879 - RNA, 19 nt, Artificial Sequence
  Synthetic
gcaaggauucgacgggaaa

SEQ ID NO: 21880 - RNA, 19 nt, Artificial Sequence
  Synthetic
ggaccuaaagccugagaau

SEQ ID NO: 21881 - RNA, 19 nt, Artificial Sequence
  Synthetic
cagaagaguugaagaauua

SEQ ID NO: 21882 - RNA, 19 nt, Artificial Sequence
  Synthetic
gguuaaagcugcagagaca

SEQ ID NO: 21883 - RNA, 19 nt, Artificial Sequence
  Synthetic
ggguaaagaaagugaacaa

SEQ ID NO: 21884 - RNA, 19 nt, Artificial Sequence
  Synthetic
ucaaauaaccuguggaaau

SEQ ID NO: 21885 - RNA, 19 nt, Artificial Sequence
  Synthetic
agucuaugcuggagaaaua

SEQ ID NO: 21886 - RNA, 19 nt, Artificial Sequence
  Synthetic
caacauaggacuuugaaua

SEQ ID NO: 21887 - RNA, 19 nt, Artificial Sequence
  Synthetic
gaauggaacuugaaagcaa

SEQ ID NO: 21888 - RNA, 19 nt, Artificial Sequence
  Synthetic
gaaggaaccuggagaagua

SEQ ID NO: 21889 - RNA, 19 nt, Artificial Sequence
  Synthetic
ccauacaaauucaaggaaa

SEQ ID NO: 21890 - RNA, 19 nt, Artificial Sequence
  Synthetic
acaacaaccucuacagaaa

SEQ ID NO: 21891 - RNA, 19 nt, Artificial Sequence
  Synthetic
gagucuagcucgagauauu

SEQ ID NO: 21892 - RNA, 19 nt, Artificial Sequence
  Synthetic
ccucauugguagagcauau

SEQ ID NO: 21893 - RNA, 19 nt, Artificial Sequence
  Synthetic
gggaagaugcaauuagaaa

SEQ ID NO: 21894 - RNA, 19 nt, Artificial Sequence
  Synthetic
ccucagaagaguugaagaa

SEQ ID NO: 21895 - RNA, 19 nt, Artificial Sequence
  Synthetic
ccuuuggacuugagauaaa

SEQ ID NO: 21896 - RNA, 19 nt, Artificial Sequence
  Synthetic
cggcaaugauccagguauu

SEQ ID NO: 21897 - RNA, 19 nt, Artificial Sequence
  Synthetic
gaauuguaguugugaggaa

SEQ ID NO: 21898 - RNA, 19 nt, Artificial Sequence
  Synthetic
gcacaaacuaccaaguaua

SEQ ID NO: 21899 - RNA, 19 nt, Artificial Sequence
  Synthetic
caaauaaccuguggaaaua

SEQ ID NO: 21900 - RNA, 19 nt, Artificial Sequence
  Synthetic
caacaacaauggugaugaa

SEQ ID NO: 21901 - RNA, 19 nt, Artificial Sequence
  Synthetic
gaggagaaauugaugaaga

SEQ ID NO: 21902 - RNA, 19 nt, Artificial Sequence
  Synthetic
agagagaccuuauuggaaa

SEQ ID NO: 21903 - RNA, 19 nt, Artificial Sequence
  Synthetic
ggacaaugugcuauacaaa

SEQ ID NO: 21904 - RNA, 19 nt, Artificial Sequence
  Synthetic
gcaccaaccucaauaggaa

SEQ ID NO: 21905 - RNA, 19 nt, Artificial Sequence
  Synthetic
gggcaaguauggaaaugaa

SEQ ID NO: 21906 - RNA, 19 nt, Artificial Sequence
  Synthetic
caucuuugccucagggaaa

SEQ ID NO: 21907 - RNA, 19 nt, Artificial Sequence
  Synthetic
gaauagcaaugauaggaaa

SEQ ID NO: 21908 - RNA, 19 nt, Artificial Sequence
  Synthetic
ucagaagaguugaagaauu

SEQ ID NO: 21909 - RNA, 19 nt, Artificial Sequence
  Synthetic
acgaaaagcccaacagaua

SEQ ID NO: 21910 - RNA, 19 nt, Artificial Sequence
  Synthetic
cgaaagguauugugacaga

SEQ ID NO: 21911 - RNA, 19 nt, Artificial Sequence
  Synthetic
cugaagaacuggaguaauu

SEQ ID NO: 21912 - RNA, 19 nt, Artificial Sequence
  Synthetic
gauuuuaacuggaggagua

SEQ ID NO: 21913 - RNA, 19 nt, Artificial Sequence
  Synthetic
gauuauggcucuuguauua

SEQ ID NO: 21914 - RNA, 19 nt, Artificial Sequence
  Synthetic
ggagaugggaggagguuua

SEQ ID NO: 21915 - RNA, 19 nt, Artificial Sequence
  Synthetic
gaaaagagauccugugaua

SEQ ID NO: 21916 - RNA, 19 nt, Artificial Sequence
  Synthetic
ggaggaaauuguuugguaa

SEQ ID NO: 21917 - RNA, 19 nt, Artificial Sequence
  Synthetic
guucaagaauggauuguua

SEQ ID NO: 21918 - RNA, 19 nt, Artificial Sequence
  Synthetic
ggacuaagauuuggagcaa

SEQ ID NO: 21919 - RNA, 19 nt, Artificial Sequence
  Synthetic
ggaaagaaugagauggaga

SEQ ID NO: 21920 - RNA, 19 nt, Artificial Sequence
  Synthetic
gugaagaaucaauggcuaa

SEQ ID NO: 21921 - RNA, 19 nt, Artificial Sequence
  Synthetic
gaacauaacagaagagauc

SEQ ID NO: 21922 - RNA, 19 nt, Artificial Sequence
  Synthetic
gcaacauggugaagaauca

SEQ ID NO: 21923 - RNA, 19 nt, Artificial Sequence
  Synthetic
gggaggagguuuacgaaga

SEQ ID NO: 21924 - RNA, 19 nt, Artificial Sequence
  Synthetic
auguaugacuggagaauuu

SEQ ID NO: 21925 - RNA, 19 nt, Artificial Sequence
  Synthetic
agaaugagauggagauaca

SEQ ID NO: 21926 - RNA, 19 nt, Artificial Sequence
  Synthetic
ggaaaugacuuguucuaau

SEQ ID NO: 21927 - RNA, 19 nt, Artificial Sequence
  Synthetic
gaaguuaccuuuugaggaa

SEQ ID NO: 21928 - RNA, 19 nt, Artificial Sequence
  Synthetic
ccauauugcuguuagagua

SEQ ID NO: 21929 - RNA, 19 nt, Artificial Sequence
  Synthetic
guuaauacauggucaagua

SEQ ID NO: 21930 - RNA, 19 nt, Artificial Sequence
  Synthetic
gcgaaagagucaugaaucu

SEQ ID NO: 21931 - RNA, 19 nt, Artificial Sequence
  Synthetic
uggaagaaggaaagaagaa

SEQ ID NO: 21932 - RNA, 19 nt, Artificial Sequence
  Synthetic
ccaaagauugauacaguua

SEQ ID NO: 21933 - RNA, 19 nt, Artificial Sequence
  Synthetic
ggaaguguuuaaagaagua

SEQ ID NO: 21934 - RNA, 19 nt, Artificial Sequence
  Synthetic
gaaauaacuugaugagguu

SEQ ID NO: 21935 - RNA, 19 nt, Artificial Sequence
  Synthetic
caguuauggaagaaggaaa

SEQ ID NO: 21936 - RNA, 19 nt, Artificial Sequence
  Synthetic
guuuaaagaaguacggauu

SEQ ID NO: 21937 - RNA, 19 nt, Artificial Sequence
  Synthetic
gguuuaacacguuggcaua

SEQ ID NO: 21938 - RNA, 19 nt, Artificial Sequence
  Synthetic
cgaaauaccuccagcagca

SEQ ID NO: 21939 - RNA, 19 nt, Artificial Sequence
  Synthetic
gaaaagaaccaaagaugaa

SEQ ID NO: 21940 - RNA, 19 nt, Artificial Sequence
  Synthetic
ggugaagaaucaauggcua

SEQ ID NO: 21941 - RNA, 19 nt, Artificial Sequence
  Synthetic
gaaaggacccagagggaaa

SEQ ID NO: 21942 - RNA, 19 nt, Artificial Sequence
  Synthetic
ggaggaagaucaaggacaa

SEQ ID NO: 21943 - RNA, 19 nt, Artificial Sequence
  Synthetic
aagaagaggaugaggaaga

SEQ ID NO: 21944 - RNA, 19 nt, Artificial Sequence
  Synthetic
ggaagaagaggaugaggaa

SEQ ID NO: 21945 - RNA, 19 nt, Artificial Sequence
  Synthetic
aagaagaagaggaggaaga

SEQ ID NO: 21946 - RNA, 19 nt, Artificial Sequence
  Synthetic
ccucagagauggccacaaa

SEQ ID NO: 21947 - RNA, 19 nt, Artificial Sequence
  Synthetic
ggaaggaggaagaggagga

SEQ ID NO: 21948 - RNA, 19 nt, Artificial Sequence
  Synthetic
ggaagaugaggaagaggaa

SEQ ID NO: 21949 - RNA, 19 nt, Artificial Sequence
  Synthetic
aggaagaggaagaggagga

SEQ ID NO: 21950 - RNA, 19 nt, Artificial Sequence
  Synthetic
aggaggaagaugaggaaga

SEQ ID NO: 21951 - RNA, 19 nt, Artificial Sequence
  Synthetic
gagaacagcaugaaggaga

SEQ ID NO: 21952 - RNA, 19 nt, Artificial Sequence
  Synthetic
ucaagaaguugcaagggaa

SEQ ID NO: 21953 - RNA, 19 nt, Artificial Sequence
  Synthetic
aggaagaagaagaggagga

SEQ ID NO: 21954 - RNA, 19 nt, Artificial Sequence
  Synthetic
agacggagcucaaggacuu

SEQ ID NO: 21955 - RNA, 19 nt, Artificial Sequence
  Synthetic
ggagccaagcccugagaaa

SEQ ID NO: 21956 - RNA, 19 nt, Artificial Sequence
  Synthetic
ggaugaucaaggagaagua

SEQ ID NO: 21957 - RNA, 19 nt, Artificial Sequence
  Synthetic
ggaacaaacuccggaucaa

SEQ ID NO: 21958 - RNA, 19 nt, Artificial Sequence
  Synthetic
aagaggaggaagaggaaga

SEQ ID NO: 21959 - RNA, 19 nt, Artificial Sequence
  Synthetic
agaucaaggacaaggaaca

SEQ ID NO: 21960 - RNA, 19 nt, Artificial Sequence
  Synthetic
ccaaagagcgguggagcaa

SEQ ID NO: 21961 - RNA, 19 nt, Artificial Sequence
  Synthetic
uggcugaggaggaggauuu

SEQ ID NO: 21962 - RNA, 19 nt, Artificial Sequence
  Synthetic
aggaugugcuacagggaga

SEQ ID NO: 21963 - RNA, 19 nt, Artificial Sequence
  Synthetic
gagggaaacuccaggcuca

SEQ ID NO: 21964 - RNA, 19 nt, Artificial Sequence
  Synthetic
ggaagaggaagaagaggau

SEQ ID NO: 21965 - RNA, 19 nt, Artificial Sequence
  Synthetic
gggagaacaccgaggaugu

SEQ ID NO: 21966 - RNA, 19 nt, Artificial Sequence
  Synthetic
ggaagaagaagaggaggaa

SEQ ID NO: 21967 - RNA, 19 nt, Artificial Sequence
  Synthetic
guacagagauggagaauga

SEQ ID NO: 21968 - RNA, 19 nt, Artificial Sequence
  Synthetic
gggaagagauggaugccaa

SEQ ID NO: 21969 - RNA, 19 nt, Artificial Sequence
  Synthetic
auaaauugcuagaggagaa

SEQ ID NO: 21970 - RNA, 19 nt, Artificial Sequence
  Synthetic
gcacaucggaacagggaaa

SEQ ID NO: 21971 - RNA, 19 nt, Artificial Sequence
  Synthetic
ggucaaggccagagggcuu

SEQ ID NO: 21972 - RNA, 19 nt, Artificial Sequence
  Synthetic
gagaaaaugcagaaagaua

SEQ ID NO: 21973 - RNA, 19 nt, Artificial Sequence
  Synthetic
cccuagaaauggagaacua

SEQ ID NO: 21974 - RNA, 19 nt, Artificial Sequence
  Synthetic
uguuuuagcacaagagaua

SEQ ID NO: 21975 - RNA, 19 nt, Artificial Sequence
  Synthetic
ggaaguugcuguuuugaaa

SEQ ID NO: 21976 - RNA, 19 nt, Artificial Sequence
  Synthetic
cuucaggauuuuaggacaa

SEQ ID NO: 21977 - RNA, 19 nt, Artificial Sequence
  Synthetic
ggaacaaguaugagguuga

SEQ ID NO: 21978 - RNA, 19 nt, Artificial Sequence
  Synthetic
ggagaaggauguuugggaa

SEQ ID NO: 21979 - RNA, 19 nt, Artificial Sequence
  Synthetic
caagagggcaagagagaga

SEQ ID NO: 21980 - RNA, 19 nt, Artificial Sequence
  Synthetic
gggaagacaugaugaccuu

SEQ ID NO: 21981 - RNA, 19 nt, Artificial Sequence
  Synthetic
uggggaaacugaagagaaa

SEQ ID NO: 21982 - RNA, 19 nt, Artificial Sequence
  Synthetic
gggccguggucaugaagaa

SEQ ID NO: 21983 - RNA, 19 nt, Artificial Sequence
  Synthetic
ggaggaagcagaacagauu

SEQ ID NO: 21984 - RNA, 19 nt, Artificial Sequence
  Synthetic
caguaaauguacagagaug

SEQ ID NO: 21985 - RNA, 19 nt, Artificial Sequence
  Synthetic
aaauaaaggacaaggagca

SEQ ID NO: 21986 - RNA, 19 nt, Artificial Sequence
  Synthetic
cggaauucauugagacaaa

SEQ ID NO: 21987 - RNA, 19 nt, Artificial Sequence
  Synthetic
gaacaaagugagagacauu

SEQ ID NO: 21988 - RNA, 19 nt, Artificial Sequence
  Synthetic
gcuaauugauuuugggauu

SEQ ID NO: 21989 - RNA, 19 nt, Artificial Sequence
  Synthetic
cuauaugacuuacgggaaa

SEQ ID NO: 21990 - RNA, 19 nt, Artificial Sequence
  Synthetic
ccacugaagaaaugaaaua

SEQ ID NO: 21991 - RNA, 19 nt, Artificial Sequence
  Synthetic
caauaacccugaagaauaa

SEQ ID NO: 21992 - RNA, 19 nt, Artificial Sequence
  Synthetic
gagcaaacugcaagaaauu

SEQ ID NO: 21993 - RNA, 19 nt, Artificial Sequence
  Synthetic
gguaauggaguguggaaau

SEQ ID NO: 21994 - RNA, 19 nt, Artificial Sequence
  Synthetic
gauaggaaguggagguuca

SEQ ID NO: 21995 - RNA, 19 nt, Artificial Sequence
  Synthetic
agaaauagguuaccggaau

SEQ ID NO: 21996 - RNA, 19 nt, Artificial Sequence
  Synthetic
ggauuuaaguggcagagaa

SEQ ID NO: 21997 - RNA, 19 nt, Artificial Sequence
  Synthetic
ucaauaacccugaagaaua

SEQ ID NO: 21998 - RNA, 19 nt, Artificial Sequence
  Synthetic
agagaaagucagaguguau

SEQ ID NO: 21999 - RNA, 19 nt, Artificial Sequence
  Synthetic
agugagauuugcugaauua

SEQ ID NO: 22000 - RNA, 19 nt, Artificial Sequence
  Synthetic
uguagaacguggagcagua

SEQ ID NO: 22001 - RNA, 19 nt, Artificial Sequence
  Synthetic
accacaagaugcagaaaua

SEQ ID NO: 22002 - RNA, 19 nt, Artificial Sequence
  Synthetic
gaucuuaauaguuggcuua

SEQ ID NO: 22003 - RNA, 19 nt, Artificial Sequence
  Synthetic
gauuuaaguggcagagaau

SEQ ID NO: 22004 - RNA, 19 nt, Artificial Sequence
  Synthetic
ggaucuaaaccaaguggaa

SEQ ID NO: 22005 - RNA, 19 nt, Artificial Sequence
  Synthetic
acgcaagaguuacuggaaa

SEQ ID NO: 22006 - RNA, 19 nt, Artificial Sequence
  Synthetic
cagagguuccagagaguaa

SEQ ID NO: 22007 - RNA, 19 nt, Artificial Sequence
  Synthetic
cgcaagaguuacuggaaaa

SEQ ID NO: 22008 - RNA, 19 nt, Artificial Sequence
  Synthetic
gauaguuaccggaacgaaa

SEQ ID NO: 22009 - RNA, 19 nt, Artificial Sequence
  Synthetic
gaaauagguuaccggaauu

SEQ ID NO: 22010 - RNA, 19 nt, Artificial Sequence
  Synthetic
cuacaacaacacagugaua

SEQ ID NO: 22011 - RNA, 19 nt, Artificial Sequence
  Synthetic
cacuagaaaugcuggaaau

SEQ ID NO: 22012 - RNA, 19 nt, Artificial Sequence
  Synthetic
ugaaauauguucugggcca

SEQ ID NO: 22013 - RNA, 19 nt, Artificial Sequence
  Synthetic
agaccuuacugaugaacua

SEQ ID NO: 22014 - RNA, 19 nt, Artificial Sequence
  Synthetic
caugggaacgcaagaguua

SEQ ID NO: 22015 - RNA, 19 nt, Artificial Sequence
  Synthetic
cuauagugguggugaaagu

SEQ ID NO: 22016 - RNA, 19 nt, Artificial Sequence
  Synthetic
agaaauagcuagugaaaga

SEQ ID NO: 22017 - RNA, 19 nt, Artificial Sequence
  Synthetic
ggagaaaucguuagagaaa

SEQ ID NO: 22018 - RNA, 19 nt, Artificial Sequence
  Synthetic
gaaacgaggugaugaaaua

SEQ ID NO: 22019 - RNA, 19 nt, Artificial Sequence
  Synthetic
gugaaaugguaucgaaaua

SEQ ID NO: 22020 - RNA, 19 nt, Artificial Sequence
  Synthetic
gggagacacuagagagaua

SEQ ID NO: 22021 - RNA, 19 nt, Artificial Sequence
  Synthetic
caacacugcuguagagaaa

SEQ ID NO: 22022 - RNA, 19 nt, Artificial Sequence
  Synthetic
caucaaacauggagaaaga

SEQ ID NO: 22023 - RNA, 19 nt, Artificial Sequence
  Synthetic
gaaagauaguggagaauau

SEQ ID NO: 22024 - RNA, 19 nt, Artificial Sequence
  Synthetic
ccaaagaaguugugaaguu

SEQ ID NO: 22025 - RNA, 19 nt, Artificial Sequence
  Synthetic
gaaacaagaugcugacaaa

SEQ ID NO: 22026 - RNA, 19 nt, Artificial Sequence
  Synthetic
gaauauaaguuccguguua

SEQ ID NO: 22027 - RNA, 19 nt, Artificial Sequence
  Synthetic
guucaaagauggaagagaa

SEQ ID NO: 22028 - RNA, 19 nt, Artificial Sequence
  Synthetic
gaaauaagcucaagaacuu

SEQ ID NO: 22029 - RNA, 19 nt, Artificial Sequence
  Synthetic
ugaagaagauggagaagaa

SEQ ID NO: 22030 - RNA, 19 nt, Artificial Sequence
  Synthetic
ggucagaacuuauguagaa

SEQ ID NO: 22031 - RNA, 19 nt, Artificial Sequence
  Synthetic
gcauaaagauggcaaagaa

SEQ ID NO: 22032 - RNA, 19 nt, Artificial Sequence
  Synthetic
ggaaaggcuuacagagaau

SEQ ID NO: 22033 - RNA, 19 nt, Artificial Sequence
  Synthetic
gaaauugagaugagugaaa

SEQ ID NO: 22034 - RNA, 19 nt, Artificial Sequence
  Synthetic
agauaguugugcagggaaa

SEQ ID NO: 22035 - RNA, 19 nt, Artificial Sequence
  Synthetic
gcuuaaauccaauggcaaa

SEQ ID NO: 22036 - RNA, 19 nt, Artificial Sequence
  Synthetic
ugaaagaugaugaaggaaa

SEQ ID NO: 22037 - RNA, 19 nt, Artificial Sequence
  Synthetic
ucacgaaggugcaaagaua

SEQ ID NO: 22038 - RNA, 19 nt, Artificial Sequence
  Synthetic
gaagaaagguggaagagau

SEQ ID NO: 22039 - RNA, 19 nt, Artificial Sequence
  Synthetic
gaaagaauccagagccaaa

SEQ ID NO: 22040 - RNA, 19 nt, Artificial Sequence
  Synthetic
acaaagauguucugcauua

SEQ ID NO: 22041 - RNA, 19 nt, Artificial Sequence
  Synthetic
acacaaauauguaguggaa

SEQ ID NO: 22042 - RNA, 19 nt, Artificial Sequence
  Synthetic
gaaacaauacugagaacua

SEQ ID NO: 22043 - RNA, 19 nt, Artificial Sequence
  Synthetic
gagaaaggaagccgagaaa

SEQ ID NO: 22044 - RNA, 19 nt, Artificial Sequence
  Synthetic
ccacaaagcaagagcagau

SEQ ID NO: 22045 - RNA, 19 nt, Artificial Sequence
  Synthetic
guaccaagguuauaguaaa

SEQ ID NO: 22046 - RNA, 19 nt, Artificial Sequence
  Synthetic
uggaauaucuggagaggaa

SEQ ID NO: 22047 - RNA, 19 nt, Artificial Sequence
  Synthetic
ccaaagugaugaugaaauu

SEQ ID NO: 22048 - RNA, 19 nt, Artificial Sequence
  Synthetic
ugacagaguucauggaaaa

SEQ ID NO: 22049 - RNA, 19 nt, Artificial Sequence
  Synthetic
gagaauaaaggaaagcuua

SEQ ID NO: 22050 - RNA, 19 nt, Artificial Sequence
  Synthetic
ggauauaugugaaggaaug

SEQ ID NO: 22051 - RNA, 19 nt, Artificial Sequence
  Synthetic
acaaaugagaacacagaua

SEQ ID NO: 22052 - RNA, 19 nt, Artificial Sequence
  Synthetic
ggaaagcuuaggaaggaaa

SEQ ID NO: 22053 - RNA, 19 nt, Artificial Sequence
  Synthetic
gagcacagaugaagagcuu

SEQ ID NO: 22054 - RNA, 19 nt, Artificial Sequence
  Synthetic
gugacagaguucauggaaa

SEQ ID NO: 22055 - RNA, 19 nt, Artificial Sequence
  Synthetic
cagaacaucuauugagaca

SEQ ID NO: 22056 - RNA, 19 nt, Artificial Sequence
  Synthetic
aggccaaagugaugaugaa

SEQ ID NO: 22057 - RNA, 19 nt, Artificial Sequence
  Synthetic
accugauacuggagaaaua

SEQ ID NO: 22058 - RNA, 19 nt, Artificial Sequence
  Synthetic
cagaagaacugaagacugu

SEQ ID NO: 22059 - RNA, 19 nt, Artificial Sequence
  Synthetic
cagagaacccuguaauuua

SEQ ID NO: 22060 - RNA, 19 nt, Artificial Sequence
  Synthetic
ccucacugguggaaggcaa

SEQ ID NO: 22061 - RNA, 19 nt, Artificial Sequence
  Synthetic
guauagcucuuuacagaaa

SEQ ID NO: 22062 - RNA, 19 nt, Artificial Sequence
  Synthetic
aggaaaugcuacugagugu

SEQ ID NO: 22063 - RNA, 19 nt, Artificial Sequence
  Synthetic
auucaaagcuagugcaacu

SEQ ID NO: 22064 - RNA, 19 nt, Artificial Sequence
  Synthetic
cuuaaggagagcagaagaa

SEQ ID NO: 22065 - RNA, 19 nt, Artificial Sequence
  Synthetic
gcaaggaauuguuugguca

SEQ ID NO: 22066 - RNA, 19 nt, Artificial Sequence
  Synthetic
cguuuuggaugaugaguau

SEQ ID NO: 22067 - RNA, 19 nt, Artificial Sequence
  Synthetic
caaaugugaagaagugaaa

SEQ ID NO: 22068 - RNA, 19 nt, Artificial Sequence
  Synthetic
cuggaaaugucuuuuguua

SEQ ID NO: 22069 - RNA, 19 nt, Artificial Sequence
  Synthetic
caagguacguuuuggauga

SEQ ID NO: 22070 - RNA, 19 nt, Artificial Sequence
  Synthetic
cgacaaaugagaacacaga

SEQ ID NO: 22071 - RNA, 19 nt, Artificial Sequence
  Synthetic
ggagaauaaaggaaagcuu

SEQ ID NO: 22072 - RNA, 19 nt, Artificial Sequence
  Synthetic
gugcaaagaucacaguuuu

SEQ ID NO: 22073 - RNA, 19 nt, Artificial Sequence
  Synthetic
aagagaagauccaagucaa

SEQ ID NO: 22074 - RNA, 19 nt, Artificial Sequence
  Synthetic
gcauuuauugucagagauu

SEQ ID NO: 22075 - RNA, 19 nt, Artificial Sequence
  Synthetic
gcugaugggcaguuguuua

SEQ ID NO: 22076 - RNA, 19 nt, Artificial Sequence
  Synthetic
caguagaggaggaggugaa

SEQ ID NO: 22077 - RNA, 19 nt, Artificial Sequence
  Synthetic
augaagaacugcugggaga

SEQ ID NO: 22078 - RNA, 19 nt, Artificial Sequence
  Synthetic
ggaagaaggccaaggcuca

SEQ ID NO: 22079 - RNA, 19 nt, Artificial Sequence
  Synthetic
gcaacgugcugcuggacaa

SEQ ID NO: 22080 - RNA, 19 nt, Artificial Sequence
  Synthetic
agacaguccaugagaagua

SEQ ID NO: 22081 - RNA, 19 nt, Artificial Sequence
  Synthetic
cgaaauuccuugagcucau

SEQ ID NO: 22082 - RNA, 19 nt, Artificial Sequence
  Synthetic
gcgagaugguggcggugaa

SEQ ID NO: 22083 - RNA, 19 nt, Artificial Sequence
  Synthetic
ucagcuaccuggagaacaa

SEQ ID NO: 22084 - RNA, 19 nt, Artificial Sequence
  Synthetic
uguaauaugcggaacuaua

SEQ ID NO: 22085 - RNA, 19 nt, Artificial Sequence
  Synthetic
ccacaagcgcuauuugaaa

SEQ ID NO: 22086 - RNA, 19 nt, Artificial Sequence
  Synthetic
uagaggaggaggugaacaa

SEQ ID NO: 22087 - RNA, 19 nt, Artificial Sequence
  Synthetic
ggaagauggugguggccca

SEQ ID NO: 22088 - RNA, 19 nt, Artificial Sequence
  Synthetic
ggucaaauaccuagccaca

SEQ ID NO: 22089 - RNA, 19 nt, Artificial Sequence
  Synthetic
cagagugccugaaggagua

SEQ ID NO: 22090 - RNA, 19 nt, Artificial Sequence
  Synthetic
ccgaaggccacgaguacua

SEQ ID NO: 22091 - RNA, 19 nt, Artificial Sequence
  Synthetic
gcuggaagcaggagauuga

SEQ ID NO: 22092 - RNA, 19 nt, Artificial Sequence
  Synthetic
gcacaaggaccaacgugua

SEQ ID NO: 22093 - RNA, 19 nt, Artificial Sequence
  Synthetic
augcaagccugaugcuaua

SEQ ID NO: 22094 - RNA, 19 nt, Artificial Sequence
  Synthetic
augcggaacuauauugaaa

SEQ ID NO: 22095 - RNA, 19 nt, Artificial Sequence
  Synthetic
ugacagaguacguggagca

SEQ ID NO: 22096 - RNA, 19 nt, Artificial Sequence
  Synthetic
agcaugaguuugugaauga

SEQ ID NO: 22097 - RNA, 19 nt, Artificial Sequence
  Synthetic
gagccaacccagaggccau

SEQ ID NO: 22098 - RNA, 19 nt, Artificial Sequence
  Synthetic
cgaccgaggaggagaucca

SEQ ID NO: 22099 - RNA, 19 nt, Artificial Sequence
  Synthetic
uggcaugaauccucgggaa

SEQ ID NO: 22100 - RNA, 19 nt, Artificial Sequence
  Synthetic
agauggucauggucaaaua

SEQ ID NO: 22101 - RNA, 19 nt, Artificial Sequence
  Synthetic
ggucauggucaaauaccua

SEQ ID NO: 22102 - RNA, 19 nt, Artificial Sequence
  Synthetic
uggaggagguggccaagaa

SEQ ID NO: 22103 - RNA, 19 nt, Artificial Sequence
  Synthetic
cugaaagagcacuguguca

SEQ ID NO: 22104 - RNA, 19 nt, Artificial Sequence
  Synthetic
gcggaacuauauugaaaca

SEQ ID NO: 22105 - RNA, 19 nt, Artificial Sequence
  Synthetic
gcacuaauccagcccuuaa

SEQ ID NO: 22106 - RNA, 19 nt, Artificial Sequence
  Synthetic
cgaaagagacggaaagaga

SEQ ID NO: 22107 - RNA, 19 nt, Artificial Sequence
  Synthetic
gcgaugaacuaaaggaaaa

SEQ ID NO: 22108 - RNA, 19 nt, Artificial Sequence
  Synthetic
gaauggaacuggagaacau

SEQ ID NO: 22109 - RNA, 19 nt, Artificial Sequence
  Synthetic
gagaaaggcccgagcgcau

SEQ ID NO: 22110 - RNA, 19 nt, Artificial Sequence
  Synthetic
gguuauguuuccaugguua

SEQ ID NO: 22111 - RNA, 19 nt, Artificial Sequence
  Synthetic
ucgaaaacgcugagauuua

SEQ ID NO: 22112 - RNA, 19 nt, Artificial Sequence
  Synthetic
ccacugagcuggcugacua

SEQ ID NO: 22113 - RNA, 19 nt, Artificial Sequence
  Synthetic
gggcugugguccagaacuu

SEQ ID NO: 22114 - RNA, 19 nt, Artificial Sequence
  Synthetic
ugaaaguggcugugaagau

SEQ ID NO: 22115 - RNA, 19 nt, Artificial Sequence
  Synthetic
cgguagaaggugugccauu

SEQ ID NO: 22116 - RNA, 19 nt, Artificial Sequence
  Synthetic
gcuucgaaagagacggaaa

SEQ ID NO: 22117 - RNA, 19 nt, Artificial Sequence
  Synthetic
acaaaggcaugcuggagua

SEQ ID NO: 22118 - RNA, 19 nt, Artificial Sequence
  Synthetic
acgcugagauuuacaacua

SEQ ID NO: 22119 - RNA, 19 nt, Artificial Sequence
  Synthetic
ccggagaggaguucaggaa

SEQ ID NO: 22120 - RNA, 19 nt, Artificial Sequence
  Synthetic
aagagauguccuuguaaua

SEQ ID NO: 22121 - RNA, 19 nt, Artificial Sequence
  Synthetic
guauggaggacguguauga

SEQ ID NO: 22122 - RNA, 19 nt, Artificial Sequence
  Synthetic
aggcagagcaccagccaga

SEQ ID NO: 22123 - RNA, 19 nt, Artificial Sequence
  Synthetic
ggaauugcaugcuggcaga

SEQ ID NO: 22124 - RNA, 19 nt, Artificial Sequence
  Synthetic
uggagaacaucuugggcca

SEQ ID NO: 22125 - RNA, 19 nt, Artificial Sequence
  Synthetic
gcugaaagcugacaucauu

SEQ ID NO: 22126 - RNA, 19 nt, Artificial Sequence
  Synthetic
guacaguucaggugacaca

SEQ ID NO: 22127 - RNA, 19 nt, Artificial Sequence
  Synthetic
cagcgaugaacuaaaggaa

SEQ ID NO: 22128 - RNA, 19 nt, Artificial Sequence
  Synthetic
cugcuuaagugcaugcauu

SEQ ID NO: 22129 - RNA, 19 nt, Artificial Sequence
  Synthetic
gagauguccuuguaauauu

SEQ ID NO: 22130 - RNA, 19 nt, Artificial Sequence
  Synthetic
ggauggcuccuuugugaaa

SEQ ID NO: 22131 - RNA, 19 nt, Artificial Sequence
  Synthetic
agaccuggcugcucggaau

SEQ ID NO: 22132 - RNA, 19 nt, Artificial Sequence
  Synthetic
ggauguugggcaaaggaga

SEQ ID NO: 22133 - RNA, 19 nt, Artificial Sequence
  Synthetic
caucgaaaacgcugagauu

SEQ ID NO: 22134 - RNA, 19 nt, Artificial Sequence
  Synthetic
gcaugaaggaguuugacca

SEQ ID NO: 22135 - RNA, 19 nt, Artificial Sequence
  Synthetic
acaauggaacccaggauga

SEQ ID NO: 22136 - RNA, 19 nt, Artificial Sequence
  Synthetic
cggcagagcagaaggccaa

SEQ ID NO: 22137 - RNA, 19 nt, Artificial Sequence
  Synthetic
agaacaucguggagggcaa

SEQ ID NO: 22138 - RNA, 19 nt, Artificial Sequence
  Synthetic
gugagaagaucauggaguu

SEQ ID NO: 22139 - RNA, 19 nt, Artificial Sequence
  Synthetic
gagaaaugccacagaaugu

SEQ ID NO: 22140 - RNA, 19 nt, Artificial Sequence
  Synthetic
gauaaugauuugaugcaca

SEQ ID NO: 22141 - RNA, 19 nt, Artificial Sequence
  Synthetic
gagggagaaucaauaaaua

SEQ ID NO: 22142 - RNA, 19 nt, Artificial Sequence
  Synthetic
ggagggaccuggagcagau

SEQ ID NO: 22143 - RNA, 19 nt, Artificial Sequence
  Synthetic
cgacaaagaaguaugccga

SEQ ID NO: 22144 - RNA, 19 nt, Artificial Sequence
  Synthetic
ugaaaggacaguacaauuu

SEQ ID NO: 22145 - RNA, 19 nt, Artificial Sequence
  Synthetic
ucauggaguugcugggaca

SEQ ID NO: 22146 - RNA, 19 nt, Artificial Sequence
  Synthetic
gacagaacgagguggaaca

SEQ ID NO: 22147 - RNA, 19 nt, Artificial Sequence
  Synthetic
gcacauuauuggggaaauu

SEQ ID NO: 22148 - RNA, 19 nt, Artificial Sequence
  Synthetic
gaugcugaccucuggcaaa

SEQ ID NO: 22149 - RNA, 19 nt, Artificial Sequence
  Synthetic
ggaagucgaccguguguga

SEQ ID NO: 22150 - RNA, 19 nt, Artificial Sequence
  Synthetic
uggaacagcggcagcggaa

SEQ ID NO: 22151 - RNA, 19 nt, Artificial Sequence
  Synthetic
cacgaggaguggacaauau

SEQ ID NO: 22152 - RNA, 19 nt, Artificial Sequence
  Synthetic
guucuuacacacacacaua

SEQ ID NO: 22153 - RNA, 19 nt, Artificial Sequence
  Synthetic
ggagggagaaucaauaaau

SEQ ID NO: 22154 - RNA, 19 nt, Artificial Sequence
  Synthetic
uugaaaggacaguacaauu

SEQ ID NO: 22155 - RNA, 19 nt, Artificial Sequence
  Synthetic
cgaccgugugugagaagau

SEQ ID NO: 22156 - RNA, 19 nt, Artificial Sequence
  Synthetic
gggaggcuucugugaggaa

SEQ ID NO: 22157 - RNA, 19 nt, Artificial Sequence
  Synthetic
gauguuuuguugacaguga

SEQ ID NO: 22158 - RNA, 19 nt, Artificial Sequence
  Synthetic
ccaaggugcugucugucua

SEQ ID NO: 22159 - RNA, 19 nt, Artificial Sequence
  Synthetic
auccagaugccuuugauaa

SEQ ID NO: 22160 - RNA, 19 nt, Artificial Sequence
  Synthetic
cggacgugguucuguuuga

SEQ ID NO: 22161 - RNA, 19 nt, Artificial Sequence
  Synthetic
ugacaacuguaacgguuuu

SEQ ID NO: 22162 - RNA, 19 nt, Artificial Sequence
  Synthetic
gggagaaucaauaaauaac

SEQ ID NO: 22163 - RNA, 19 nt, Artificial Sequence
  Synthetic
gaacaaguacuuuccuuuu

SEQ ID NO: 22164 - RNA, 19 nt, Artificial Sequence
  Synthetic
gcacaggacucugaagaac

SEQ ID NO: 22165 - RNA, 19 nt, Artificial Sequence
  Synthetic
gaacaucguggagggcaaa

SEQ ID NO: 22166 - RNA, 19 nt, Artificial Sequence
  Synthetic
gcacagagaccgugggcaa

SEQ ID NO: 22167 - RNA, 19 nt, Artificial Sequence
  Synthetic
ggaaauaaaccuuuggaau

SEQ ID NO: 22168 - RNA, 19 nt, Artificial Sequence
  Synthetic
ccacgcaggugcagaacua

SEQ ID NO: 22169 - RNA, 19 nt, Artificial Sequence
  Synthetic
cggagagccugcaggagaa

SEQ ID NO: 22170 - RNA, 19 nt, Artificial Sequence
  Synthetic
ccgacuuccugcagcgaaa

SEQ ID NO: 22171 - RNA, 19 nt, Artificial Sequence
  Synthetic
gagcaagagcacacggaga

SEQ ID NO: 22172 - RNA, 19 nt, Artificial Sequence
  Synthetic
ggacuuagaagaagaaaau

SEQ ID NO: 22173 - RNA, 19 nt, Artificial Sequence
  Synthetic
gagaaaacuuguagguguu

SEQ ID NO: 22174 - RNA, 19 nt, Artificial Sequence
  Synthetic
gcuuggacuuagaagaaga

SEQ ID NO: 22175 - RNA, 19 nt, Artificial Sequence
  Synthetic
gggaauacuucaugcaaag

SEQ ID NO: 22176 - RNA, 19 nt, Artificial Sequence
  Synthetic
gugcuuggacuuagaagaa

SEQ ID NO: 22177 - RNA, 19 nt, Artificial Sequence
  Synthetic
aggagaagcccauggagau

SEQ ID NO: 22178 - RNA, 19 nt, Artificial Sequence
  Synthetic
ggggaauacuucaugcaaa

SEQ ID NO: 22179 - RNA, 19 nt, Artificial Sequence
  Synthetic
caggagaagcccauggaga

SEQ ID NO: 22180 - RNA, 19 nt, Artificial Sequence
  Synthetic
acuuguagguguuuaagaa

SEQ ID NO: 22181 - RNA, 19 nt, Artificial Sequence
  Synthetic
cgcgguaccuccagagcaa

SEQ ID NO: 22182 - RNA, 19 nt, Artificial Sequence
  Synthetic
ugaaggaacugaaacauga

SEQ ID NO: 22183 - RNA, 19 nt, Artificial Sequence
  Synthetic
auaccaacguaaggaaaua

SEQ ID NO: 22184 - RNA, 19 nt, Artificial Sequence
  Synthetic
guugaauguucucuugaua

SEQ ID NO: 22185 - RNA, 19 nt, Artificial Sequence
  Synthetic
gcauggacuucgaugaguu

SEQ ID NO: 22186 - RNA, 19 nt, Artificial Sequence
  Synthetic
ugauagugcuggacccuuu

SEQ ID NO: 22187 - RNA, 19 nt, Artificial Sequence
  Synthetic
cccaagcacuuuaugcaua

SEQ ID NO: 22188 - RNA, 19 nt, Artificial Sequence
  Synthetic
acggagagccugcaggaga

SEQ ID NO: 22189 - RNA, 19 nt, Artificial Sequence
  Synthetic
gcaaggaccugaucggcca

SEQ ID NO: 22190 - RNA, 19 nt, Artificial Sequence
  Synthetic
ccaagcacuuuaugcauau

SEQ ID NO: 22191 - RNA, 19 nt, Artificial Sequence
  Synthetic
gggcauguuugaauuuauu

SEQ ID NO: 22192 - RNA, 19 nt, Artificial Sequence
  Synthetic
ccugaagguggccgagcua

SEQ ID NO: 22193 - RNA, 19 nt, Artificial Sequence
  Synthetic
acgagaagaacaagacguu

SEQ ID NO: 22194 - RNA, 19 nt, Artificial Sequence
  Synthetic
ccgucaagugcauuaacaa

SEQ ID NO: 22195 - RNA, 19 nt, Artificial Sequence
  Synthetic
gggcagaaccagcacaucu

SEQ ID NO: 22196 - RNA, 19 nt, Artificial Sequence
  Synthetic
gagcauaggaacagugaua

SEQ ID NO: 22197 - RNA, 19 nt, Artificial Sequence
  Synthetic
aaacaaaguuggugaccua

SEQ ID NO: 22198 - RNA, 19 nt, Artificial Sequence
  Synthetic
aaucauggaucaagagaua

SEQ ID NO: 22199 - RNA, 19 nt, Artificial Sequence
  Synthetic
gcauaggaacagugauaua

SEQ ID NO: 22200 - RNA, 19 nt, Artificial Sequence
  Synthetic
cgauauaaauucugcauca

SEQ ID NO: 22201 - RNA, 19 nt, Artificial Sequence
  Synthetic
ccuaguauucccagagaaa

SEQ ID NO: 22202 - RNA, 19 nt, Artificial Sequence
  Synthetic
gggaaugagccacgggaau

SEQ ID NO: 22203 - RNA, 19 nt, Artificial Sequence
  Synthetic
guuuggacuuggugaauaa

SEQ ID NO: 22204 - RNA, 19 nt, Artificial Sequence
  Synthetic
cagagaaacucaucuauaa

SEQ ID NO: 22205 - RNA, 19 nt, Artificial Sequence
  Synthetic
ucacugaauuguuguguaa

SEQ ID NO: 22206 - RNA, 19 nt, Artificial Sequence
  Synthetic
gcaagaaacuuacagaaaa

SEQ ID NO: 22207 - RNA, 19 nt, Artificial Sequence
  Synthetic
guacauggcuccugagguu

SEQ ID NO: 22208 - RNA, 19 nt, Artificial Sequence
  Synthetic
uggguuugcuucagagaaa

SEQ ID NO: 22209 - RNA, 19 nt, Artificial Sequence
  Synthetic
guuccuacguuguguauua

SEQ ID NO: 22210 - RNA, 19 nt, Artificial Sequence
  Synthetic
ccucaagacuuaaggaugu

SEQ ID NO: 22211 - RNA, 19 nt, Artificial Sequence
  Synthetic
cacaaauacugcuuggaaa

SEQ ID NO: 22212 - RNA, 19 nt, Artificial Sequence
  Synthetic
ccaaauagcuagucaugga

SEQ ID NO: 22213 - RNA, 19 nt, Artificial Sequence
  Synthetic
gagcagaaucuuacaucua

SEQ ID NO: 22214 - RNA, 19 nt, Artificial Sequence
  Synthetic
guggagaccucgcagauua

SEQ ID NO: 22215 - RNA, 19 nt, Artificial Sequence
  Synthetic
cugaagaacagucgaaaga

SEQ ID NO: 22216 - RNA, 19 nt, Artificial Sequence
  Synthetic
ggagaaugcaggcaguuaa

SEQ ID NO: 22217 - RNA, 19 nt, Artificial Sequence
  Synthetic
ggaagaaauagcuuaagaa

SEQ ID NO: 22218 - RNA, 19 nt, Artificial Sequence
  Synthetic
cagaaaagcugaaucgauu

SEQ ID NO: 22219 - RNA, 19 nt, Artificial Sequence
  Synthetic
cuacaaguuuccaaagauu

SEQ ID NO: 22220 - RNA, 19 nt, Artificial Sequence
  Synthetic
ugcaagaaacuuacagaaa

SEQ ID NO: 22221 - RNA, 19 nt, Artificial Sequence
  Synthetic
gcagagaaacucaucuaua

SEQ ID NO: 22222 - RNA, 19 nt, Artificial Sequence
  Synthetic
gcacaaauguacaugguuc

SEQ ID NO: 22223 - RNA, 19 nt, Artificial Sequence
  Synthetic
uaucagaucaacaaggaaa

SEQ ID NO: 22224 - RNA, 19 nt, Artificial Sequence
  Synthetic
gaaacaaaaucauggauca

SEQ ID NO: 22225 - RNA, 19 nt, Artificial Sequence
  Synthetic
cuauaauugugcuguagaa

SEQ ID NO: 22226 - RNA, 19 nt, Artificial Sequence
  Synthetic
ggaaauaggacaaguuaau

SEQ ID NO: 22227 - RNA, 19 nt, Artificial Sequence
  Synthetic
gaacagaaaccaagaaaca

SEQ ID NO: 22228 - RNA, 19 nt, Artificial Sequence
  Synthetic
ccaagaauguuuugaguuu

SEQ ID NO: 22229 - RNA, 19 nt, Artificial Sequence
  Synthetic
aagcaagaguaaagacuaa

SEQ ID NO: 22230 - RNA, 19 nt, Artificial Sequence
  Synthetic
ggaccaaauuucaaaggaa

SEQ ID NO: 22231 - RNA, 19 nt, Artificial Sequence
  Synthetic
ugacauaaucuaaggguau

SEQ ID NO: 22232 - RNA, 19 nt, Artificial Sequence
  Synthetic
gggaaauggaucagacaau

SEQ ID NO: 22233 - RNA, 19 nt, Artificial Sequence
  Synthetic
gcuggaaaguacaugguaa

SEQ ID NO: 22234 - RNA, 19 nt, Artificial Sequence
  Synthetic
gauuguaccaguugagaua

SEQ ID NO: 22235 - RNA, 19 nt, Artificial Sequence
  Synthetic
gcuauagaguccaaaggaa

SEQ ID NO: 22236 - RNA, 19 nt, Artificial Sequence
  Synthetic
ggucaaauagggcaaauaa

SEQ ID NO: 22237 - RNA, 19 nt, Artificial Sequence
  Synthetic
gaagaagacugaugagacu

SEQ ID NO: 22238 - RNA, 19 nt, Artificial Sequence
  Synthetic
guauauaucccucuaguaa

SEQ ID NO: 22239 - RNA, 19 nt, Artificial Sequence
  Synthetic
ucaaacagcucuaguauga

SEQ ID NO: 22240 - RNA, 19 nt, Artificial Sequence
  Synthetic
ggaauuuguuuucgccuua

SEQ ID NO: 22241 - RNA, 19 nt, Artificial Sequence
  Synthetic
agaagaagcaaucuaguua

SEQ ID NO: 22242 - RNA, 19 nt, Artificial Sequence
  Synthetic
caaauacagaggugguuua

SEQ ID NO: 22243 - RNA, 19 nt, Artificial Sequence
  Synthetic
gagcauuccuacucacaua

SEQ ID NO: 22244 - RNA, 19 nt, Artificial Sequence
  Synthetic
cuucaaggauggaacaaga

SEQ ID NO: 22245 - RNA, 19 nt, Artificial Sequence
  Synthetic
gagaacagaaaccaagaaa

SEQ ID NO: 22246 - RNA, 19 nt, Artificial Sequence
  Synthetic
gccaaugcucagaagaaua

SEQ ID NO: 22247 - RNA, 19 nt, Artificial Sequence
  Synthetic
gaaagcaaccuuaaaguuu

SEQ ID NO: 22248 - RNA, 19 nt, Artificial Sequence
  Synthetic
ccaagaaacaugguaauua

SEQ ID NO: 22249 - RNA, 19 nt, Artificial Sequence
  Synthetic
gggcaaggaucacaucuaa

SEQ ID NO: 22250 - RNA, 19 nt, Artificial Sequence
  Synthetic
cccgcaucgucgagaaaua

SEQ ID NO: 22251 - RNA, 19 nt, Artificial Sequence
  Synthetic
cugccaaugcucagaagaa

SEQ ID NO: 22252 - RNA, 19 nt, Artificial Sequence
  Synthetic
aggaaugaguucuuaucua

SEQ ID NO: 22253 - RNA, 19 nt, Artificial Sequence
  Synthetic
gaguaaagacuaagguuuc

SEQ ID NO: 22254 - RNA, 19 nt, Artificial Sequence
  Synthetic
uauagaguccaaaggaaua

SEQ ID NO: 22255 - RNA, 19 nt, Artificial Sequence
  Synthetic
gacagugaauucagguuua

SEQ ID NO: 22256 - RNA, 19 nt, Artificial Sequence
  Synthetic
agaaaucacugaagggaaa

SEQ ID NO: 22257 - RNA, 19 nt, Artificial Sequence
  Synthetic
cggaaggaggagacaguua

SEQ ID NO: 22258 - RNA, 19 nt, Artificial Sequence
  Synthetic
cccuagaggugcagauaau

SEQ ID NO: 22259 - RNA, 19 nt, Artificial Sequence
  Synthetic
ggcagaaugagguggacua

SEQ ID NO: 22260 - RNA, 19 nt, Artificial Sequence
  Synthetic
caacaaagaaguaugcuga

SEQ ID NO: 22261 - RNA, 19 nt, Artificial Sequence
  Synthetic
ccgcagacguggugcucuu

SEQ ID NO: 22262 - RNA, 19 nt, Artificial Sequence
  Synthetic
aagaaaucacugaagggaa

SEQ ID NO: 22263 - RNA, 19 nt, Artificial Sequence
  Synthetic
ccucggagcagaaggccaa

SEQ ID NO: 22264 - RNA, 19 nt, Artificial Sequence
  Synthetic
ccuccaaacggcagaccaa

SEQ ID NO: 22265 - RNA, 19 nt, Artificial Sequence
  Synthetic
gggaacagcuagcggcaag

SEQ ID NO: 22266 - RNA, 19 nt, Artificial Sequence
  Synthetic
gccagaagcagguggucau

SEQ ID NO: 22267 - RNA, 19 nt, Artificial Sequence
  Synthetic
ggugaugccuaauuaugaa

SEQ ID NO: 22268 - RNA, 19 nt, Artificial Sequence
  Synthetic
gaucaucccuagaggugca

SEQ ID NO: 22269 - RNA, 19 nt, Artificial Sequence
  Synthetic
cgcagaguauuaagggaca

SEQ ID NO: 22270 - RNA, 19 nt, Artificial Sequence
  Synthetic
gagaccuguuccagaugaa

SEQ ID NO: 22271 - RNA, 19 nt, Artificial Sequence
  Synthetic
gugcuaagaucgugcagcu

SEQ ID NO: 22272 - RNA, 19 nt, Artificial Sequence
  Synthetic
cgagagaggcagggaucuu

SEQ ID NO: 22273 - RNA, 19 nt, Artificial Sequence
  Synthetic
gaggaauucugcuugccaa

SEQ ID NO: 22274 - RNA, 19 nt, Artificial Sequence
  Synthetic
cucaaaacacucaaagaaa

SEQ ID NO: 22275 - RNA, 19 nt, Artificial Sequence
  Synthetic
gaauucugcuugccaacaa

SEQ ID NO: 22276 - RNA, 19 nt, Artificial Sequence
  Synthetic
uuaugaauccaacguguaa

SEQ ID NO: 22277 - RNA, 19 nt, Artificial Sequence
  Synthetic
gaaguaugcugaugugauc

SEQ ID NO: 22278 - RNA, 19 nt, Artificial Sequence
  Synthetic
cggcaagucuuccgugugu

SEQ ID NO: 22279 - RNA, 19 nt, Artificial Sequence
  Synthetic
agaaguaugcugaugugau

SEQ ID NO: 22280 - RNA, 19 nt, Artificial Sequence
  Synthetic
caagccugccuuugaggaa

SEQ ID NO: 22281 - RNA, 19 nt, Artificial Sequence
  Synthetic
cggaugccuuugacaauga

SEQ ID NO: 22282 - RNA, 19 nt, Artificial Sequence
  Synthetic
caaagaaguaugcugaugu

SEQ ID NO: 22283 - RNA, 19 nt, Artificial Sequence
  Synthetic
gcagaaugagguggacuau

SEQ ID NO: 22284 - RNA, 19 nt, Artificial Sequence
  Synthetic
ccuaugacauuacuguauu

SEQ ID NO: 22285 - RNA, 19 nt, Artificial Sequence
  Synthetic
cggcgagcccuuccuuaua

SEQ ID NO: 22286 - RNA, 19 nt, Artificial Sequence
  Synthetic
cggaagaaggacuggaaaa

SEQ ID NO: 22287 - RNA, 19 nt, Artificial Sequence
  Synthetic
acgacgugccugaggacaa

SEQ ID NO: 22288 - RNA, 19 nt, Artificial Sequence
  Synthetic
gugcaaacgucaucaucuu

SEQ ID NO: 22289 - RNA, 19 nt, Artificial Sequence
  Synthetic
ucaucaagcaguacaacaa

SEQ ID NO: 22290 - RNA, 19 nt, Artificial Sequence
  Synthetic
acgaggaggaaguggccua

SEQ ID NO: 22291 - RNA, 19 nt, Artificial Sequence
  Synthetic
ccaaagaggccuucgccau

SEQ ID NO: 22292 - RNA, 19 nt, Artificial Sequence
  Synthetic
gugucaaggugcccauuua

SEQ ID NO: 22293 - RNA, 19 nt, Artificial Sequence
  Synthetic
ucuacaaggugcugacuga

SEQ ID NO: 22294 - RNA, 19 nt, Artificial Sequence
  Synthetic
uguuggagcuccuggacau

SEQ ID NO: 22295 - RNA, 19 nt, Artificial Sequence
  Synthetic
gcagugacgaggaggaagu

SEQ ID NO: 22296 - RNA, 19 nt, Artificial Sequence
  Synthetic
ccgcaucaucccaggcauu

SEQ ID NO: 22297 - RNA, 19 nt, Artificial Sequence
  Synthetic
ucaucaucuuugagggcau

SEQ ID NO: 22298 - RNA, 19 nt, Artificial Sequence
  Synthetic
gcaacacgguggccaucaa

SEQ ID NO: 22299 - RNA, 19 nt, Artificial Sequence
  Synthetic
gcgacgaguucaucuucua

SEQ ID NO: 22300 - RNA, 19 nt, Artificial Sequence
  Synthetic
uggacaagcgggucaauga

SEQ ID NO: 22301 - RNA, 19 nt, Artificial Sequence
  Synthetic
ccggaagaaggacuggaaa

SEQ ID NO: 22302 - RNA, 19 nt, Artificial Sequence
  Synthetic
aggaacaggccgcacacaa

SEQ ID NO: 22303 - RNA, 19 nt, Artificial Sequence
  Synthetic
ggcaggacuaugcgggcaa

SEQ ID NO: 22304 - RNA, 19 nt, Artificial Sequence
  Synthetic
ggacuguugaauacaaaga

SEQ ID NO: 22305 - RNA, 19 nt, Artificial Sequence
  Synthetic
caggacuguugaauacaaa

SEQ ID NO: 22306 - RNA, 19 nt, Artificial Sequence
  Synthetic
gacccaggacuguugaaua

SEQ ID NO: 22307 - RNA, 19 nt, Artificial Sequence
  Synthetic
cugagcagcagcaggaaca

SEQ ID NO: 22308 - RNA, 19 nt, Artificial Sequence
  Synthetic
acucaguggccuaugcauu

SEQ ID NO: 22309 - RNA, 19 nt, Artificial Sequence
  Synthetic
caaugaacacggcacgcaa

SEQ ID NO: 22310 - RNA, 19 nt, Artificial Sequence
  Synthetic
gagcgugaacucagcguca

SEQ ID NO: 22311 - RNA, 19 nt, Artificial Sequence
  Synthetic
cggguuagcugcccaguga

SEQ ID NO: 22312 - RNA, 19 nt, Artificial Sequence
  Synthetic
ccaggacuguugaauacaa

SEQ ID NO: 22313 - RNA, 19 nt, Artificial Sequence
  Synthetic
ccauggacuccuucuacaa

SEQ ID NO: 22314 - RNA, 19 nt, Artificial Sequence
  Synthetic
ggacacagacuccgacauc

SEQ ID NO: 22315 - RNA, 19 nt, Artificial Sequence
  Synthetic
acccaggacuguugaauac

SEQ ID NO: 22316 - RNA, 19 nt, Artificial Sequence
  Synthetic
cagaaggacuggagugaua

SEQ ID NO: 22317 - RNA, 19 nt, Artificial Sequence
  Synthetic
gggacagacuuuaguaaua

SEQ ID NO: 22318 - RNA, 19 nt, Artificial Sequence
  Synthetic
gauccaagagcuagggaaa

SEQ ID NO: 22319 - RNA, 19 nt, Artificial Sequence
  Synthetic
ggaagaguggucagagaaa

SEQ ID NO: 22320 - RNA, 19 nt, Artificial Sequence
  Synthetic
cgacagaauuacaauagaa

SEQ ID NO: 22321 - RNA, 19 nt, Artificial Sequence
  Synthetic
cagcauggcgacagaauua

SEQ ID NO: 22322 - RNA, 19 nt, Artificial Sequence
  Synthetic
gcgaaaggucagaggagau

SEQ ID NO: 22323 - RNA, 19 nt, Artificial Sequence
  Synthetic
aguaauaguuccaccuaaa

SEQ ID NO: 22324 - RNA, 19 nt, Artificial Sequence
  Synthetic
caaugaaacuuguuaccaa

SEQ ID NO: 22325 - RNA, 19 nt, Artificial Sequence
  Synthetic
ggucagagaaacaguauau

SEQ ID NO: 22326 - RNA, 19 nt, Artificial Sequence
  Synthetic
aaacagaaguugugaguuc

SEQ ID NO: 22327 - RNA, 19 nt, Artificial Sequence
  Synthetic
ggauaaucgccuucacaaa

SEQ ID NO: 22328 - RNA, 19 nt, Artificial Sequence
  Synthetic
agagaagugcacugggaaa

SEQ ID NO: 22329 - RNA, 19 nt, Artificial Sequence
  Synthetic
ccucauagaaccagagcau

SEQ ID NO: 22330 - RNA, 19 nt, Artificial Sequence
  Synthetic
gacagaaguuugcaagaua

SEQ ID NO: 22331 - RNA, 19 nt, Artificial Sequence
  Synthetic
ggugaauuugggagugaaa

SEQ ID NO: 22332 - RNA, 19 nt, Artificial Sequence
  Synthetic
uggagauguucaaggacaa

SEQ ID NO: 22333 - RNA, 19 nt, Artificial Sequence
  Synthetic
caacauuccuccauauuua

SEQ ID NO: 22334 - RNA, 19 nt, Artificial Sequence
  Synthetic
uggcaugccuuaagagaga

SEQ ID NO: 22335 - RNA, 19 nt, Artificial Sequence
  Synthetic
gaaaguauagccagagaau

SEQ ID NO: 22336 - RNA, 19 nt, Artificial Sequence
  Synthetic
gagaagaagauccgaauca

SEQ ID NO: 22337 - RNA, 19 nt, Artificial Sequence
  Synthetic
ugguugaggcccagcgaaa

SEQ ID NO: 22338 - RNA, 19 nt, Artificial Sequence
  Synthetic
guggaagaguggucagaga

SEQ ID NO: 22339 - RNA, 19 nt, Artificial Sequence
  Synthetic
uugaagagauggauaguca

SEQ ID NO: 22340 - RNA, 19 nt, Artificial Sequence
  Synthetic
gaguaguaacaaugagaga

SEQ ID NO: 22341 - RNA, 19 nt, Artificial Sequence
  Synthetic
cagacuauggaaugaguaa

SEQ ID NO: 22342 - RNA, 19 nt, Artificial Sequence
  Synthetic
ccgacaacuucuaaggaga

SEQ ID NO: 22343 - RNA, 19 nt, Artificial Sequence
  Synthetic
ggucagaggagaugggucu

SEQ ID NO: 22344 - RNA, 19 nt, Artificial Sequence
  Synthetic
aggaguuaaacaugaguaa

SEQ ID NO: 22345 - RNA, 19 nt, Artificial Sequence
  Synthetic
caacugagccaauggauca

SEQ ID NO: 22346 - RNA, 19 nt, Artificial Sequence
  Synthetic
gaaagagaguccagaagua

SEQ ID NO: 22347 - RNA, 19 nt, Artificial Sequence
  Synthetic
aaacaaaccaggugaaauu

SEQ ID NO: 22348 - RNA, 19 nt, Artificial Sequence
  Synthetic
ggaauggaaaguaggauua

SEQ ID NO: 22349 - RNA, 19 nt, Artificial Sequence
  Synthetic
gcuuaagaauucuggauau

SEQ ID NO: 22350 - RNA, 19 nt, Artificial Sequence
  Synthetic
gguuauacuccuuaaguua

SEQ ID NO: 22351 - RNA, 19 nt, Artificial Sequence
  Synthetic
gaaaaugccucguguaaaa

SEQ ID NO: 22352 - RNA, 19 nt, Artificial Sequence
  Synthetic
aaguaaggaugauggcaaa

SEQ ID NO: 22353 - RNA, 19 nt, Artificial Sequence
  Synthetic
caaagaagcgaaagaaaga

SEQ ID NO: 22354 - RNA, 19 nt, Artificial Sequence
  Synthetic
ggagaauggagguuugaaa

SEQ ID NO: 22355 - RNA, 19 nt, Artificial Sequence
  Synthetic
ggucaaacacacagacaga

SEQ ID NO: 22356 - RNA, 19 nt, Artificial Sequence
  Synthetic
caauaacaaagaagcgaaa

SEQ ID NO: 22357 - RNA, 19 nt, Artificial Sequence
  Synthetic
gaaguaaggaugauggcaa

SEQ ID NO: 22358 - RNA, 19 nt, Artificial Sequence
  Synthetic
cugcaaaaccagagcaaau

SEQ ID NO: 22359 - RNA, 19 nt, Artificial Sequence
  Synthetic
cagaaggaguucauaaaga

SEQ ID NO: 22360 - RNA, 19 nt, Artificial Sequence
  Synthetic
gagacaucuugcagaacaa

SEQ ID NO: 22361 - RNA, 19 nt, Artificial Sequence
  Synthetic
auuugcaguuggagagaua

SEQ ID NO: 22362 - RNA, 19 nt, Artificial Sequence
  Synthetic
gaggauaauuugaaagauc

SEQ ID NO: 22363 - RNA, 19 nt, Artificial Sequence
  Synthetic
agguguacuugguagauua

SEQ ID NO: 22364 - RNA, 19 nt, Artificial Sequence
  Synthetic
cagugaaauuacuagacua

SEQ ID NO: 22365 - RNA, 19 nt, Artificial Sequence
  Synthetic
agaaggaguucauaaagaa

SEQ ID NO: 22366 - RNA, 19 nt, Artificial Sequence
  Synthetic
ccaaauacauggaaacagu

SEQ ID NO: 22367 - RNA, 19 nt, Artificial Sequence
  Synthetic
acuaaaagcuauaggaagu

SEQ ID NO: 22368 - RNA, 19 nt, Artificial Sequence
  Synthetic
acauggaaacagugaaauu

SEQ ID NO: 22369 - RNA, 19 nt, Artificial Sequence
  Synthetic
auacauggaaacagugaaa

SEQ ID NO: 22370 - RNA, 19 nt, Artificial Sequence
  Synthetic
gaagauacggaauggucaa

SEQ ID NO: 22371 - RNA, 19 nt, Artificial Sequence
  Synthetic
aagaagcgaaagaaagaaa

SEQ ID NO: 22372 - RNA, 19 nt, Artificial Sequence
  Synthetic
caggugaaauugccaaaua

SEQ ID NO: 22373 - RNA, 19 nt, Artificial Sequence
  Synthetic
caaggaaccugguguugaa

SEQ ID NO: 22374 - RNA, 19 nt, Artificial Sequence
  Synthetic
aacaaagaagcgaaagaaa

SEQ ID NO: 22375 - RNA, 19 nt, Artificial Sequence
  Synthetic
aggaauggaaaguaggauu

SEQ ID NO: 22376 - RNA, 19 nt, Artificial Sequence
  Synthetic
ggaagaaguuacagauuua

SEQ ID NO: 22377 - RNA, 19 nt, Artificial Sequence
  Synthetic
caaauaaaccagagaaaga

SEQ ID NO: 22378 - RNA, 19 nt, Artificial Sequence
  Synthetic
caacaaagcaagucaacaa

SEQ ID NO: 22379 - RNA, 19 nt, Artificial Sequence
  Synthetic
caggaaagcacaaggagaa

SEQ ID NO: 22380 - RNA, 19 nt, Artificial Sequence
  Synthetic
cacaauagguuaaucgaaa

SEQ ID NO: 22381 - RNA, 19 nt, Artificial Sequence
  Synthetic
gggaagaaguuacagauuu

SEQ ID NO: 22382 - RNA, 19 nt, Artificial Sequence
  Synthetic
cacaaauaaaccagagaaa

SEQ ID NO: 22383 - RNA, 19 nt, Artificial Sequence
  Synthetic
aauggaaagacuaggaaua

SEQ ID NO: 22384 - RNA, 19 nt, Artificial Sequence
  Synthetic
cauggaaagugcagaaaga

SEQ ID NO: 22385 - RNA, 19 nt, Artificial Sequence
  Synthetic
ccacaaaaggacagaguau

SEQ ID NO: 22386 - RNA, 19 nt, Artificial Sequence
  Synthetic
uggaauaccuuuaggacca

SEQ ID NO: 22387 - RNA, 19 nt, Artificial Sequence
  Synthetic
aggagaaacugauuggauu

SEQ ID NO: 22388 - RNA, 19 nt, Artificial Sequence
  Synthetic
caacauggaaagugcagaa

SEQ ID NO: 22389 - RNA, 19 nt, Artificial Sequence
  Synthetic
ccgaaauguuguauucuua

SEQ ID NO: 22390 - RNA, 19 nt, Artificial Sequence
  Synthetic
agagaaagaugcaagacau

SEQ ID NO: 22391 - RNA, 19 nt, Artificial Sequence
  Synthetic
ggacuuuccuacagauauu

SEQ ID NO: 22392 - RNA, 19 nt, Artificial Sequence
  Synthetic
acaaaaggacagaguauaa

SEQ ID NO: 22393 - RNA, 19 nt, Artificial Sequence
  Synthetic
cuaucaagcccucaagaaa

SEQ ID NO: 22394 - RNA, 19 nt, Artificial Sequence
  Synthetic
uguuggauguacuggaaua

SEQ ID NO: 22395 - RNA, 19 nt, Artificial Sequence
  Synthetic
cacaaggagaagacagaaa

SEQ ID NO: 22396 - RNA, 19 nt, Artificial Sequence
  Synthetic
aggaauagauuuacagaag

SEQ ID NO: 22397 - RNA, 19 nt, Artificial Sequence
  Synthetic
augcaagacauguaguaaa

SEQ ID NO: 22398 - RNA, 19 nt, Artificial Sequence
  Synthetic
uggaugauauggaaggcaa

SEQ ID NO: 22399 - RNA, 19 nt, Artificial Sequence
  Synthetic
acgcaaacaacuugauuau

SEQ ID NO: 22400 - RNA, 19 nt, Artificial Sequence
  Synthetic
caaggagaagacagaaaua

SEQ ID NO: 22401 - RNA, 19 nt, Artificial Sequence
  Synthetic
gcaagguucuggaugauau

SEQ ID NO: 22402 - RNA, 19 nt, Artificial Sequence
  Synthetic
ggacuuuggccuacaauuu

SEQ ID NO: 22403 - RNA, 19 nt, Artificial Sequence
  Synthetic
agaaauaucaagagucuca

SEQ ID NO: 22404 - RNA, 19 nt, Artificial Sequence
  Synthetic
acaaacaguaucaggaaaa

SEQ ID NO: 22405 - RNA, 19 nt, Artificial Sequence
  Synthetic
cgacgcagcuggagagaag

SEQ ID NO: 22406 - RNA, 19 nt, Artificial Sequence
  Synthetic
ccucagaagaccaggaaga

SEQ ID NO: 22407 - RNA, 19 nt, Artificial Sequence
  Synthetic
ccucagaagaccaggcaga

SEQ ID NO: 22408 - RNA, 19 nt, Artificial Sequence
  Synthetic
ugaguauguucauggaaau

SEQ ID NO: 22409 - RNA, 19 nt, Artificial Sequence
  Synthetic
aggaagagcccucagguga

SEQ ID NO: 22410 - RNA, 19 nt, Artificial Sequence
  Synthetic
guggcaaacacguggccua

SEQ ID NO: 22411 - RNA, 19 nt, Artificial Sequence
  Synthetic
gaggacaucaugaagcaaa

SEQ ID NO: 22412 - RNA, 19 nt, Artificial Sequence
  Synthetic
cagagacccugcagaagua

SEQ ID NO: 22413 - RNA, 19 nt, Artificial Sequence
  Synthetic
ggacagugcugacagacga

SEQ ID NO: 22414 - RNA, 19 nt, Artificial Sequence
  Synthetic
cuuccaaggcucaaagaga

SEQ ID NO: 22415 - RNA, 19 nt, Artificial Sequence
  Synthetic
guguucaccaggacaaaua

SEQ ID NO: 22416 - RNA, 19 nt, Artificial Sequence
  Synthetic
cacucaaacuggaugccaa

SEQ ID NO: 22417 - RNA, 19 nt, Artificial Sequence
  Synthetic
gggcgacaguggaagcuga

SEQ ID NO: 22418 - RNA, 19 nt, Artificial Sequence
  Synthetic
gcucaaagagagggcugaa

SEQ ID NO: 22419 - RNA, 19 nt, Artificial Sequence
  Synthetic
cuguccagacuguggcaaa

SEQ ID NO: 22420 - RNA, 19 nt, Artificial Sequence
  Synthetic
ugaaguggcucuacggguu

SEQ ID NO: 22421 - RNA, 19 nt, Artificial Sequence
  Synthetic
ggacaaauugccuucccaa

SEQ ID NO: 22422 - RNA, 19 nt, Artificial Sequence
  Synthetic
gcuuguucaaugagcagaa

SEQ ID NO: 22423 - RNA, 19 nt, Artificial Sequence
  Synthetic
auccagaggaccagaguca

SEQ ID NO: 22424 - RNA, 19 nt, Artificial Sequence
  Synthetic
ccgccaagccucugcaagu

SEQ ID NO: 22425 - RNA, 19 nt, Artificial Sequence
  Synthetic
cuguaaacuuguagcauua

SEQ ID NO: 22426 - RNA, 19 nt, Artificial Sequence
  Synthetic
guacauagcuguuugaaau

SEQ ID NO: 22427 - RNA, 19 nt, Artificial Sequence
  Synthetic
uagaaagagugcagaacaa

SEQ ID NO: 22428 - RNA, 19 nt, Artificial Sequence
  Synthetic
cagcaauggcacugguaaa

SEQ ID NO: 22429 - RNA, 19 nt, Artificial Sequence
  Synthetic
ggccgaggcuugagguaua

SEQ ID NO: 22430 - RNA, 19 nt, Artificial Sequence
  Synthetic
gggcuuuauuacagacaua

SEQ ID NO: 22431 - RNA, 19 nt, Artificial Sequence
  Synthetic
gggcagaagaugaucauau

SEQ ID NO: 22432 - RNA, 19 nt, Artificial Sequence
  Synthetic
gguauugccuugugaauuu

SEQ ID NO: 22433 - RNA, 19 nt, Artificial Sequence
  Synthetic
acuacagaaucaugaguua

SEQ ID NO: 22434 - RNA, 19 nt, Artificial Sequence
  Synthetic
ucgacuuauuggaaagaaa

SEQ ID NO: 22435 - RNA, 19 nt, Artificial Sequence
  Synthetic
aggaagaagaggaggagga

SEQ ID NO: 22436 - RNA, 19 nt, Artificial Sequence
  Synthetic
uuguaaugguggaaguuua

SEQ ID NO: 22437 - RNA, 19 nt, Artificial Sequence
  Synthetic
aauaugaagucccgguaua

SEQ ID NO: 22438 - RNA, 19 nt, Artificial Sequence
  Synthetic
gggaauuugaugugcgaca

SEQ ID NO: 22439 - RNA, 19 nt, Artificial Sequence
  Synthetic
uuaaagaagcagaguugaa

SEQ ID NO: 22440 - RNA, 19 nt, Artificial Sequence
  Synthetic
gcuguaaacuuguagcauu

SEQ ID NO: 22441 - RNA, 19 nt, Artificial Sequence
  Synthetic
gugcagaacaauuacgaau

SEQ ID NO: 22442 - RNA, 19 nt, Artificial Sequence
  Synthetic
cugaagaaggagacgaaga

SEQ ID NO: 22443 - RNA, 19 nt, Artificial Sequence
  Synthetic
agaaagcacagauggcaaa

SEQ ID NO: 22444 - RNA, 19 nt, Artificial Sequence
  Synthetic
aauagaacaucucgacuua

SEQ ID NO: 22445 - RNA, 19 nt, Artificial Sequence
  Synthetic
cauggaagccagugauuau

SEQ ID NO: 22446 - RNA, 19 nt, Artificial Sequence
  Synthetic
ggagaucaauggcaugaaa

SEQ ID NO: 22447 - RNA, 19 nt, Artificial Sequence
  Synthetic
gcugaugcuauaagugaaa

SEQ ID NO: 22448 - RNA, 19 nt, Artificial Sequence
  Synthetic
gugaggaggaggaagaaga

SEQ ID NO: 22449 - RNA, 19 nt, Artificial Sequence
  Synthetic
agaccugcuaagagaauua

SEQ ID NO: 22450 - RNA, 19 nt, Artificial Sequence
  Synthetic
agugaaaacuacagaauca

SEQ ID NO: 22451 - RNA, 19 nt, Artificial Sequence
  Synthetic
aagcagaguugaaggaucu

SEQ ID NO: 22452 - RNA, 19 nt, Artificial Sequence
  Synthetic
gugauuagccauuugacua

SEQ ID NO: 22453 - RNA, 19 nt, Artificial Sequence
  Synthetic
auuaugagcuugaagauga

SEQ ID NO: 22454 - RNA, 19 nt, Artificial Sequence
  Synthetic
agguaaaugcauugguaaa

SEQ ID NO: 22455 - RNA, 19 nt, Artificial Sequence
  Synthetic
acucauaggauuugaagaa

SEQ ID NO: 22456 - RNA, 19 nt, Artificial Sequence
  Synthetic
cugucgaaauggagguaaa

SEQ ID NO: 22457 - RNA, 19 nt, Artificial Sequence
  Synthetic
gggaacaucagaaagguua

SEQ ID NO: 22458 - RNA, 19 nt, Artificial Sequence
  Synthetic
gcguaagucacaagaauuu

SEQ ID NO: 22459 - RNA, 19 nt, Artificial Sequence
  Synthetic
caacaaaugccaaugucaa

SEQ ID NO: 22460 - RNA, 19 nt, Artificial Sequence
  Synthetic
gagggagagcagugugaaa

SEQ ID NO: 22461 - RNA, 19 nt, Artificial Sequence
  Synthetic
caacagagaaugccagcua

SEQ ID NO: 22462 - RNA, 19 nt, Artificial Sequence
  Synthetic
caagaguacucauaggauu

SEQ ID NO: 22463 - RNA, 19 nt, Artificial Sequence
  Synthetic
gugccgaaauggaggcuuu

SEQ ID NO: 22464 - RNA, 19 nt, Artificial Sequence
  Synthetic
ucauaggauuugaagaaga

SEQ ID NO: 22465 - RNA, 19 nt, Artificial Sequence
  Synthetic
cauggaagacacugcaaua

SEQ ID NO: 22466 - RNA, 19 nt, Artificial Sequence
  Synthetic
gaagauauccugauuguuu

SEQ ID NO: 22467 - RNA, 19 nt, Artificial Sequence
  Synthetic
ccaaagguuaccagggaga

SEQ ID NO: 22468 - RNA, 19 nt, Artificial Sequence
  Synthetic
uggagugaacugugacaaa

SEQ ID NO: 22469 - RNA, 19 nt, Artificial Sequence
  Synthetic
aaacacagcucuuaccuaa

SEQ ID NO: 22470 - RNA, 19 nt, Artificial Sequence
  Synthetic
uguugaaguuacagcauuu

SEQ ID NO: 22471 - RNA, 19 nt, Artificial Sequence
  Synthetic
uggaagacacugcaauaaa

SEQ ID NO: 22472 - RNA, 19 nt, Artificial Sequence
  Synthetic
gguaguggcauuuaaacaa

SEQ ID NO: 22473 - RNA, 19 nt, Artificial Sequence
  Synthetic
ggagguaaaugcauuggua

SEQ ID NO: 22474 - RNA, 19 nt, Artificial Sequence
  Synthetic
gagguaaaugcauugguaa

SEQ ID NO: 22475 - RNA, 19 nt, Artificial Sequence
  Synthetic
ggaugugauuguuaugaau

SEQ ID NO: 22476 - RNA, 19 nt, Artificial Sequence
  Synthetic
auguaugaaugguggacuu

SEQ ID NO: 22477 - RNA, 19 nt, Artificial Sequence
  Synthetic
aagaguacucauaggauuu

SEQ ID NO: 22478 - RNA, 19 nt, Artificial Sequence
  Synthetic
ccagagauucaguauuaaa

SEQ ID NO: 22479 - RNA, 19 nt, Artificial Sequence
  Synthetic
uuccagagauucaguauua

SEQ ID NO: 22480 - RNA, 19 nt, Artificial Sequence
  Synthetic
gaaaagcgcaacagagaau

SEQ ID NO: 22481 - RNA, 19 nt, Artificial Sequence
  Synthetic
cauaggauuugaagaagau

SEQ ID NO: 22482 - RNA, 19 nt, Artificial Sequence
  Synthetic
guucaaagccugucugcga

SEQ ID NO: 22483 - RNA, 19 nt, Artificial Sequence
  Synthetic
gcucuuaccuaauaaacau

SEQ ID NO: 22484 - RNA, 19 nt, Artificial Sequence
  Synthetic
agacaguggcauagaguua

SEQ ID NO: 22485 - RNA, 19 nt, Artificial Sequence
  Synthetic
gcucaggacuccagcuaaa

SEQ ID NO: 22486 - RNA, 19 nt, Artificial Sequence
  Synthetic
gcaaaagccucuauagaaa

SEQ ID NO: 22487 - RNA, 19 nt, Artificial Sequence
  Synthetic
agcaagagguuaaagauaa

SEQ ID NO: 22488 - RNA, 19 nt, Artificial Sequence
  Synthetic
gcaagagguuaaagauaau

SEQ ID NO: 22489 - RNA, 19 nt, Artificial Sequence
  Synthetic
aagauaagacaguggcaua

SEQ ID NO: 22490 - RNA, 19 nt, Artificial Sequence
  Synthetic
cugaagaaguugugucauu

SEQ ID NO: 22491 - RNA, 19 nt, Artificial Sequence
  Synthetic
gaugaaaggcgcaaaggaa

SEQ ID NO: 22492 - RNA, 19 nt, Artificial Sequence
  Synthetic
ugacugaacuugggaaaua

SEQ ID NO: 22493 - RNA, 19 nt, Artificial Sequence
  Synthetic
aaaggaagcaagagguuaa

SEQ ID NO: 22494 - RNA, 19 nt, Artificial Sequence
  Synthetic
aagcaagagguuaaagaua

SEQ ID NO: 22495 - RNA, 19 nt, Artificial Sequence
  Synthetic
ucacauacagagagaauuu

SEQ ID NO: 22496 - RNA, 19 nt, Artificial Sequence
  Synthetic
ccacaaaccgugacccaua

SEQ ID NO: 22497 - RNA, 19 nt, Artificial Sequence
  Synthetic
ccuacuacguccagcgcua

SEQ ID NO: 22498 - RNA, 19 nt, Artificial Sequence
  Synthetic
ggaaugaauuuguugcaga

SEQ ID NO: 22499 - RNA, 19 nt, Artificial Sequence
  Synthetic
acgcagaaggccugggcua

SEQ ID NO: 22500 - RNA, 19 nt, Artificial Sequence
  Synthetic
gguaaagguuguugcuguu

SEQ ID NO: 22501 - RNA, 19 nt, Artificial Sequence
  Synthetic
ugacagagaucuuccagaa

SEQ ID NO: 22502 - RNA, 19 nt, Artificial Sequence
  Synthetic
cuacaagcauauaugagaa

SEQ ID NO: 22503 - RNA, 19 nt, Artificial Sequence
  Synthetic
cagagaucuuccagaauuu

SEQ ID NO: 22504 - RNA, 19 nt, Artificial Sequence
  Synthetic
acucacauacagagagaau

SEQ ID NO: 22505 - RNA, 19 nt, Artificial Sequence
  Synthetic
gagcacuaauugaaggaca

SEQ ID NO: 22506 - RNA, 19 nt, Artificial Sequence
  Synthetic
agcacuaauugaaggacaa

SEQ ID NO: 22507 - RNA, 19 nt, Artificial Sequence
  Synthetic
uguugcagauacaggauaa

SEQ ID NO: 22508 - RNA, 19 nt, Artificial Sequence
  Synthetic
gcaaaggaagcaagagguu

SEQ ID NO: 22509 - RNA, 19 nt, Artificial Sequence
  Synthetic
guagaagguaggaguaaga

SEQ ID NO: 22510 - RNA, 19 nt, Artificial Sequence
  Synthetic
ccaaacucgagcagagaau

SEQ ID NO: 22511 - RNA, 19 nt, Artificial Sequence
  Synthetic
ccagcaacacggaaguaua

SEQ ID NO: 22512 - RNA, 19 nt, Artificial Sequence
  Synthetic
uggauaucaucuuggagaa

SEQ ID NO: 22513 - RNA, 19 nt, Artificial Sequence
  Synthetic
gaagguaggaguaagaaaa

SEQ ID NO: 22514 - RNA, 19 nt, Artificial Sequence
  Synthetic
ggaaggagauggaaaguau

SEQ ID NO: 22515 - RNA, 19 nt, Artificial Sequence
  Synthetic
gaauauagaugaacagaga

SEQ ID NO: 22516 - RNA, 19 nt, Artificial Sequence
  Synthetic
gguuauaucccgagcaauu

SEQ ID NO: 22517 - RNA, 19 nt, Artificial Sequence
  Synthetic
gagaaaagaugcugaaaga

SEQ ID NO: 22518 - RNA, 19 nt, Artificial Sequence
  Synthetic
gagaaaaucuugugugcaa

SEQ ID NO: 22519 - RNA, 19 nt, Artificial Sequence
  Synthetic
gcaaaagaugcuugggaaa

SEQ ID NO: 22520 - RNA, 19 nt, Artificial Sequence
  Synthetic
ccgugaaguacuagaacaa

SEQ ID NO: 22521 - RNA, 19 nt, Artificial Sequence
  Synthetic
agaacaugcugaugguuua

SEQ ID NO: 22522 - RNA, 19 nt, Artificial Sequence
  Synthetic
gaagguaacuagaaaguga

SEQ ID NO: 22523 - RNA, 19 nt, Artificial Sequence
  Synthetic
ucauggaacugaaagaaua

SEQ ID NO: 22524 - RNA, 19 nt, Artificial Sequence
  Synthetic
agaaauuggugaaacacua

SEQ ID NO: 22525 - RNA, 19 nt, Artificial Sequence
  Synthetic
gauggaagguaauguuuaa

SEQ ID NO: 22526 - RNA, 19 nt, Artificial Sequence
  Synthetic
gcacaaaucugccaaaaua

SEQ ID NO: 22527 - RNA, 19 nt, Artificial Sequence
  Synthetic
ugacaaugguggauacuau

SEQ ID NO: 22528 - RNA, 19 nt, Artificial Sequence
  Synthetic
ccacgaaaguagcaaucaa

SEQ ID NO: 22529 - RNA, 19 nt, Artificial Sequence
  Synthetic
ggaaaucccucgagaaucu

SEQ ID NO: 22530 - RNA, 19 nt, Artificial Sequence
  Synthetic
aguaagagagagugaaaca

SEQ ID NO: 22531 - RNA, 19 nt, Artificial Sequence
  Synthetic
gauuaugaagcuagaacua

SEQ ID NO: 22532 - RNA, 19 nt, Artificial Sequence
  Synthetic
gcaaacagaacuaguaaca

SEQ ID NO: 22533 - RNA, 19 nt, Artificial Sequence
  Synthetic
gaaaagaugcugaaagauu

SEQ ID NO: 22534 - RNA, 19 nt, Artificial Sequence
  Synthetic
acucagagcuccucacuua

SEQ ID NO: 22535 - RNA, 19 nt, Artificial Sequence
  Synthetic
gaucaaucgcuacaggaaa

SEQ ID NO: 22536 - RNA, 19 nt, Artificial Sequence
  Synthetic
gauuugaauagcagcauua

SEQ ID NO: 22537 - RNA, 19 nt, Artificial Sequence
  Synthetic
uuagagggauggaagguaa

SEQ ID NO: 22538 - RNA, 19 nt, Artificial Sequence
  Synthetic
cagaagaccuuucauuuaa

SEQ ID NO: 22539 - RNA, 19 nt, Artificial Sequence
  Synthetic
ugauaaacuuguuccacua

SEQ ID NO: 22540 - RNA, 19 nt, Artificial Sequence
  Synthetic
ugauauggcugcucagauu

SEQ ID NO: 22541 - RNA, 19 nt, Artificial Sequence
  Synthetic
gaagaaggacccugaugaa

SEQ ID NO: 22542 - RNA, 19 nt, Artificial Sequence
  Synthetic
aaacaaaaguccagccauu

SEQ ID NO: 22543 - RNA, 19 nt, Artificial Sequence
  Synthetic
ggagauuggugggaagcaa

SEQ ID NO: 22544 - RNA, 19 nt, Artificial Sequence
  Synthetic
gcuuaaagaacgagaaaga

SEQ ID NO: 22545 - RNA, 19 nt, Artificial Sequence
  Synthetic
gcucagacauagagaagua

SEQ ID NO: 22546 - RNA, 19 nt, Artificial Sequence
  Synthetic
gcuaaaagccagagaaauu

SEQ ID NO: 22547 - RNA, 19 nt, Artificial Sequence
  Synthetic
gagugaagaucgaugauaa

SEQ ID NO: 22548 - RNA, 19 nt, Artificial Sequence
  Synthetic
gaagauagcuagaugaaaa

SEQ ID NO: 22549 - RNA, 19 nt, Artificial Sequence
  Synthetic
agagaaagaggcagaaaua

SEQ ID NO: 22550 - RNA, 19 nt, Artificial Sequence
  Synthetic
acacagagcaagacaauaa

SEQ ID NO: 22551 - RNA, 19 nt, Artificial Sequence
  Synthetic
ggaaaguucuacaggguuu

SEQ ID NO: 22552 - RNA, 19 nt, Artificial Sequence
  Synthetic
ggaccuaacuuuaucauua

SEQ ID NO: 22553 - RNA, 19 nt, Artificial Sequence
  Synthetic
gaauuaagccaaagaagua

SEQ ID NO: 22554 - RNA, 19 nt, Artificial Sequence
  Synthetic
gaaguggauuguaggaaua

SEQ ID NO: 22555 - RNA, 19 nt, Artificial Sequence
  Synthetic
gaggauugcuugagaccua

SEQ ID NO: 22556 - RNA, 19 nt, Artificial Sequence
  Synthetic
caggaaaucuagaagacua

SEQ ID NO: 22557 - RNA, 19 nt, Artificial Sequence
  Synthetic
uaaagaaacuagagcguga

SEQ ID NO: 22558 - RNA, 19 nt, Artificial Sequence
  Synthetic
cuacaguucuauagguuaa

SEQ ID NO: 22559 - RNA, 19 nt, Artificial Sequence
  Synthetic
gcggaguggaggugcgaaa

SEQ ID NO: 22560 - RNA, 19 nt, Artificial Sequence
  Synthetic
gaacaaaaccucaggauga

SEQ ID NO: 22561 - RNA, 19 nt, Artificial Sequence
  Synthetic
ggaaauaccuucuaauuga

SEQ ID NO: 22562 - RNA, 19 nt, Artificial Sequence
  Synthetic
ccaaauagggccaaagaga

SEQ ID NO: 22563 - RNA, 19 nt, Artificial Sequence
  Synthetic
guaaagaucauuuggaaga

SEQ ID NO: 22564 - RNA, 19 nt, Artificial Sequence
  Synthetic
gguaagacuauuucaguua

SEQ ID NO: 22565 - RNA, 19 nt, Artificial Sequence
  Synthetic
ggagaaauaacuaguagaa

SEQ ID NO: 22566 - RNA, 19 nt, Artificial Sequence
  Synthetic
gaacauaugaacugaauga

SEQ ID NO: 22567 - RNA, 19 nt, Artificial Sequence
  Synthetic
gaagaagaccugaaagaca

SEQ ID NO: 22568 - RNA, 19 nt, Artificial Sequence
  Synthetic
cgagaaagacguuuaaaga

SEQ ID NO: 22569 - RNA, 19 nt, Artificial Sequence
  Synthetic
gagcuuaaagaacgagaaa

SEQ ID NO: 22570 - RNA, 19 nt, Artificial Sequence
  Synthetic
ggaguaagacaguaaauau

SEQ ID NO: 22571 - RNA, 19 nt, Artificial Sequence
  Synthetic
ugagauagcuacaguucua

SEQ ID NO: 22572 - RNA, 19 nt, Artificial Sequence
  Synthetic
cagcauacgaccugaauuu

SEQ ID NO: 22573 - RNA, 19 nt, Artificial Sequence
  Synthetic
gaauuagaauacagcagaa

SEQ ID NO: 22574 - RNA, 19 nt, Artificial Sequence
  Synthetic
cagaggagcucaaggacaa

SEQ ID NO: 22575 - RNA, 19 nt, Artificial Sequence
  Synthetic
ugaaguaccuggaggagaa

SEQ ID NO: 22576 - RNA, 19 nt, Artificial Sequence
  Synthetic
cggaagagaugaugcgcga

SEQ ID NO: 22577 - RNA, 19 nt, Artificial Sequence
  Synthetic
gcaacguccugcugguuaa

SEQ ID NO: 22578 - RNA, 19 nt, Artificial Sequence
  Synthetic
aggagaucccugugagcaa

SEQ ID NO: 22579 - RNA, 19 nt, Artificial Sequence
  Synthetic
ggaagacgguguaccacua

SEQ ID NO: 22580 - RNA, 19 nt, Artificial Sequence
  Synthetic
ggaugaaguaccuggagga

SEQ ID NO: 22581 - RNA, 19 nt, Artificial Sequence
  Synthetic
ccucauagcugacauugaa

SEQ ID NO: 22582 - RNA, 19 nt, Artificial Sequence
  Synthetic
gccagaagcccuacaagaa

SEQ ID NO: 22583 - RNA, 19 nt, Artificial Sequence
  Synthetic
acaaguuccuggucggcaa

SEQ ID NO: 22584 - RNA, 19 nt, Artificial Sequence
  Synthetic
uggaguaucugaagcugaa

SEQ ID NO: 22585 - RNA, 19 nt, Artificial Sequence
  Synthetic
ccagaggagcucaaggaca

SEQ ID NO: 22586 - RNA, 19 nt, Artificial Sequence
  Synthetic
ccucagagacgaaucgaca

SEQ ID NO: 22587 - RNA, 19 nt, Artificial Sequence
  Synthetic
ggaaggagcagggcacaua

SEQ ID NO: 22588 - RNA, 19 nt, Artificial Sequence
  Synthetic
aggcagacacggaagagau

SEQ ID NO: 22589 - RNA, 19 nt, Artificial Sequence
  Synthetic
gcguguaccgcaugcgcaa

SEQ ID NO: 22590 - RNA, 19 nt, Artificial Sequence
  Synthetic
ggagaaggcagacacggaa

SEQ ID NO: 22591 - RNA, 19 nt, Artificial Sequence
  Synthetic
ccuucaucgagcagggcaa

SEQ ID NO: 22592 - RNA, 19 nt, Artificial Sequence
  Synthetic
cggagaaggcagacacgga

SEQ ID NO: 22593 - RNA, 19 nt, Artificial Sequence
  Synthetic
guggagaagcucauugcua

SEQ ID NO: 22594 - RNA, 19 nt, Artificial Sequence
  Synthetic
cccucaacucagauggaua

SEQ ID NO: 22595 - RNA, 19 nt, Artificial Sequence
  Synthetic
ggccagaagcccuacaaga

SEQ ID NO: 22596 - RNA, 19 nt, Artificial Sequence
  Synthetic
cagaagcccuacaagaaga

SEQ ID NO: 22597 - RNA, 19 nt, Artificial Sequence
  Synthetic
gcagcgaugucuggagcua

SEQ ID NO: 22598 - RNA, 19 nt, Artificial Sequence
  Synthetic
ucuggcagcugguggagua

SEQ ID NO: 22599 - RNA, 19 nt, Artificial Sequence
  Synthetic
aguaccuggaggagaagaa

SEQ ID NO: 22600 - RNA, 19 nt, Artificial Sequence
  Synthetic
cgccaagaucagcgacuuu

SEQ ID NO: 22601 - RNA, 19 nt, Artificial Sequence
  Synthetic
aggccgagcgcaaacuuua

SEQ ID NO: 22602 - RNA, 19 nt, Artificial Sequence
  Synthetic
gggaaguggccgcucaagu

SEQ ID NO: 22603 - RNA, 19 nt, Artificial Sequence
  Synthetic
gcgcgauaaccuccucaua

We claim:

1. An siRNA comprising a sense region and an antisense region, wherein said sense region and said antisense region together form a duplex region, said antisense region and said sense region are each 18-30 nucleotides in length and said antisense region comprises a sequence that is at least 90% complementary to a sequence selected from the group consisting of SEQ. ID NOs. 438-1596, 1624-1736, 1750-2249, 2273-2736, 2767-3026, 3052-3061, 3092-3211, 3242-5170, 5201-6151, 6182-6691, 6722-6781, 6842-8179, 8210-9674, 9705-11257, 11265-11573, 11604-14767, 14798-15655, 15686-16369, 16430-17213, 17244-20589, 20592-20732, 20761-21252, 21283-22424, 22454-22603.

2. An siRNA comprising a sense region and an antisense region, wherein said sense region and said antisense region together form a duplex region and said sense region and said antisense region are each 18-30 nucleotides in length, and said antisense region comprises a sequence that is 100% complementary to a contiguous stretch of at least 18 bases of a sequence selected from the group consisting of SEQ. ID NOs. 438-1596, 1624-1736, 1750-2249, 2273-2736, 2767-3026, 3052-3061, 3092-3211, 3242-5170, 5201-6151, 6182-6691, 6722-6781, 6842-8179, 8210-9674, 9705-11257, 11265-11573, 11604-14767, 14798-15655, 15686-16369, 16430-17213, 17244-20589, 20592-20732, 20761-21252, 21283-22424, 22454-22603.

3. The siRNA of claim 2, wherein each of said antisense region and said sense region are 19-30 nucleotides in length, and said antisense region comprises a sequence that is 100% complementary to said sequence selected from the group consisting of: SEQ. ID NOs. 438-1596, 1624-1736, 1750-2249, 2273-2736, 2767-3026, 3052-3061, 3092-3211, 3242-5170, 5201-6151, 6182-6691, 6722-6781, 6842-8179, 8210-9674, 9705-11257, 11265-11573, 11604-14767, 14798-15655, 15686-16369, 16430-17213, 17244-20589, 20592-20732, 20761-21252, 21283-22424, 22454-22603.

4. A pool of at least two siRNAs, wherein said pool comprises a first siRNA and a second siRNA, said first siRNA comprises a first antisense region and a first sense region that together form a first duplex region and each of said first antisense region and said first sense region are 18-30 nucleotides in length and said first antisense region is at least 90% complementary to 18 bases of a first sequence selected from the group consisting of: SEQ. ID NOs. 438-22603 and said second siRNA comprises a second antisense region and a second sense region that together form a second duplex region and each of said second antisense region and said second sense region are 18-30 nucleotides in length and said second antisense region is at least 90% complementary to 18 bases of a second sequence selected from the group consisting of: SEQ. ID NOs. 438-22603, wherein said first antisense region and said second antisense region are not identical.

5. The pool of claim 4, wherein said first antisense region comprises a sequence that is 100% complementary to at least 18 bases of said first sequence, and said second antisense region comprises a sequence that is 100% complementary to at least 18 bases of said second sequence.

6. The pool of claim 4, wherein said first siRNA is 19-30 nucleotides in length and said first antisense region comprises a sequence that is at least 90% complementary to said first sequence, and second siRNA is 19-30 nucleotides in length and said second antisense region comprises a sequence that is at least 90% complementary to said second sequence.

7. The pool of claim 4, wherein said first antisense region is 19-30 nucleotides in length and said first antisense region comprises a sequence that is 100% complementary to at least 18 bases of said first sequence, and said second antisense region is 19-30 nucleotides in length and said second antisense region comprises a sequence that is 100% complementary to said second sequence.

8. The siRNA of claim 1, wherein said antisense region and said sense region are each 19-25 nucleotides in length.

9. The siRNA of claim 4, wherein said first antisense region, said first sense region, said second sense region and said second antisense region are each 19-25 nucleotides in length.
